(19) United States
(12) Patent Application Publication
(10) Pub. No.: US 2026/0218177 A1
(43) Pub. Date: Jul. 30, 2026

(54) MODIFIED DOUBLE-STRANDED RNA AGENTS

(71) Applicant: ALNYLAM PHARMACEUTICALS, INC., Cambridge, MA (US)

(72) Inventors: Muthiah MANOHARAN, Cambridge, MA (US); Shigeo MATSUDA, Cambridge, MA (US); Atsushi MIKAMI, Cambridge, MA (US); Dhrubajyoti DATTA, Cambridge, MA (US)

(21) Appl. No.: 19/115,987

(22) PCT Filed: Sep. 29, 2023
(86) PCT No.: PCT/US2023/075613

§ 371 Date: Mar. 27, 2025

Related U.S. Application Data
(60) Provisional application No. 63/412,286, filed on Sep. 30, 2022.
(60) Provisional application No. 63/434,690, filed on Dec. 22, 2022.

(51) Int. Cl. C12N 15/113

(52) U.S. Cl. CPC C12N 15/113; C12N 2310/14; C12N 2310/313; C12N 2310/315; C12N 2310/321; C12N 2310/3515; C12N 2320/32

(57) ABSTRACT

One aspect of the present disclosure relates to a dsRNA agent comprising a sense strand and an antisense strand sufficiently complementary to at least one portion of a mRNA of the target gene, each strand having 14 to 40 nucleotides, wherein the antisense strand comprises at least one TNA (threose nucleic acid) at position 1, counting from the 5′ end. Other aspects of the invention relate to a method of modulating the expression of a target gene in a cell and a method of treating a subject having a CNS disorder comprising administering to a cell or a subject the dsRNA agent.

### CROSS-REFERENCE TO RELATED APPLICATIONS

[0001] This application claims benefit of priority to U.S. Provisional Application No. 63/412,286, filed Sep. 30, 2022, and U.S. Provisional Application No. 63/434,690 filed Dec. 22, 2022, both of which are herein incorporated by reference in their entirety.

### SEQUENCE LISTING

[0002] The instant application contains a Sequence Listing which has been submitted in XML format and is hereby incorporated by reference in its entirety. Said XML copy, created on Sep. 27, 2023, is named 29520_1513-PCT__ALN-501-WO_SL.xml and is 2,546,681 bytes in size.

### FIELD OF INVENTION

[0003] This invention generally relates to the field of RNA interference technology with modified double-stranded RNA agents.

### BACKGROUND

[0004] Chemical modifications of the nucleobases, ribose sugar, and phosphate backbone have been used to improve drug-like properties of therapeutic oligonucleotides and to confer favorable pharmacological properties to GalNAc-siRNA conjugates in preclinical and clinical development.

[0005] Moreover, efficient delivery of an siRNA agent to cells in vivo requires specific targeting and substantial protection from the extracellular environment, particularly serum proteins. RNAi-based therapeutics show promising clinical data for treatment of liver-associated disorders. However, siRNA delivery into extra-hepatic tissues remains an obstacle, limiting the use of siRNA-based therapies.

[0006] Thus, there is a continuing need for dsRNA agents to improve the nucleose stability as well as the gene silencing efficacy of siRNA gene therapeutics. Besides, there is a continuing need for new and improved methods for delivering siRNA agents in vivo, without the use of tissue delivery reagents, to achieve and enhance the therapeutic potential of siRNA agents.

### SUMMARY

[0007] One aspect of the invention provides a double-stranded RNA (dsRNA) agent capable of modulating the expression of a target gene, comprising: a sense strand and an antisense strand sufficiently complementary to at least one portion of a mRNA of the target gene, each strand having 14 to 40 nucleotides, wherein the antisense strand comprises at least one TNA (threose nucleic acid) at position 1, counting from the 5′ end.

[0008] Another aspect of the invention provides a double-stranded RNA (dsRNA) agent capable of modulating the expression of a target gene, comprising: a sense strand and an antisense strand sufficiently complementary to at least one portion of a mRNA of the target gene, each strand having 14 to 40 nucleotides, wherein:
[0009] the sense strand comprises at least one 2′-OMe modification at position 1, counting from the 5′ end; and
[0010] the antisense strand comprises at least one TNA (threose nucleic acid) at position 1, counting from the 5′ end.

[0011] In some embodiments, the sense strand further comprises at least one 2′-OMe modification at position 2, counting from the 5′ end.

[0012] In some embodiments, the dsRNA agent contains one or more ligands conjugated to at least one strand, optionally via a linker or carrier.

[0013] Another aspect of the invention relates to a double-stranded RNA (dsRNA) agent capable of modulating the expression of a target gene, comprising a sense strand and an antisense strand sufficiently complementary to at least one portion of a mRNA of the target gene, each strand having 14 to 40 nucleotides, wherein:
[0014] one of the sense or antisense strand comprises at least one 4′-modified TNA (threose nucleic acid) having the structure of

[chemical structure]

wherein:
[0015] each R is independently an optionally substituted alkyl,
[0016] B is an optionally modified nucleobase, and
[0017] * represents the bond to H or to the internucleotide linkage to the subsequent nucleotide.

[0018] In some embodiments, the dsRNA agent contains one or more ligands conjugated to at least one strand, optionally via a linker or carrier.

[0019] In some embodiments, at least one ligand is a lipophilic moiety.

[0020] In all the above aspects of the invention relating to a dsRNA agent, in some embodiments, at least one ligand is ASGPR ligand. The ASGPR ligand may be one or more GalNAc derivatives attached through a bivalent or trivalent branched linker. In one embodiment, the ASGPR ligand is:

[chemical structure]

[0021] Another aspect of the invention relates to a double-stranded RNA (dsRNA) agent capable of modulating the expression of a target gene, comprising a sense strand and an antisense strand sufficiently complementary to at least one portion of a mRNA of a target gene. The antisense strand comprises at least one TNA (threose nucleic acid) at position 1, counting from the 5′ end. The dsRNA agent comprises one or more lipophilic moieties conjugated to at least one strand, optionally via a linker or carrier.

[0022] The embodiments discussed below applies to all the above aspects of the invention relating to a dsRNA agent.

[0023] In some embodiments, the lipophilicity of the lipophilic moiety, measured by octanol-water partition coefficient, log K_{ow}, exceeds 0. The lipophilic moiety may possess a log K_{ow} exceeding 1, exceeding 1.5, exceeding 2, exceeding 3, exceeding 4, exceeding 5, or exceeding 10.

[0024] In some embodiments, the hydrophobicity of the dsRNA agent, measured by the unbound fraction in the plasma protein binding assay of the dsRNA agent, exceeds 0.2. In one embodiment, the plasma protein binding assay determined is an electrophoretic mobility shift assay (EMSA) using human serum albumin protein. The hydrophobicity of the dsRNA agent, measured by fraction of unbound siRNA in the binding assay, exceeds 0.15, exceeds 0.2, exceeds 0.25, exceeds 0.3, exceeds 0.35, exceeds 0.4, exceeds 0.45, or exceeds 0.5 for an enhanced in vivo delivery of siRNA.

[0025] In some embodiments, the lipophilic moiety is an aliphatic, cyclic such as alicyclic, or polycyclic such as polyalicyclic compound, such as a steroid (e.g., sterol) or a linear or branched aliphatic hydrocarbon. Exemplary lipophilic moieties are lipid, cholesterol, retinoic acid, cholic acid, adamantane acetic acid, 1-pyrene butyric acid, dihydrotestosterone, 1,3-bis-O(hexadecyl)glycerol, geranyloxyhexyanol, hexadecylglycerol, borneol, menthol, 1,3-propanediol, heptadecyl group, palmitic acid, myristic acid, O3-(oleoyl)lithocholic acid, O3-(oleoyl)cholenic acid, ibuprofen, naproxen, dimethoxytrityl, or phenoxazine.

[0026] Suitable lipophilic moieties also include those containing a saturated or unsaturated C₄-C₃₀ hydrocarbon chain (e.g., C₄-C₃₀ alkyl or alkenyl), and an optional functional group selected from the group consisting of hydroxyl, amine, carboxylic acid, sulfonate, phosphate, thiol, azide, and alkyne. The functional groups are useful to attach the lipophilic moiety to the iRNA agent. In some embodiments, the lipophilic moiety contains a saturated or unsaturated C₄-C₁₈ hydrocarbon chain (e.g., a linear C₄-C₁₈ alkyl or alkenyl). In some embodiments, the lipophilic moiety contains a saturated or unsaturated C₆-C₁₈ hydrocarbon chain (e.g., a linear C₆-C₁₈ alkyl or alkenyl). In one embodiment, the lipophilic moiety contains a saturated or unsaturated C₁₆ hydrocarbon chain (e.g., a linear C₁₆ alkyl or alkenyl).

[0027] In some embodiments, the lipophilic moiety is a C₄-C₃₀ acid or C₄-C₁₈ acid (e.g., hexanoic acid, heptanoic acid, octanoic acid, nonanoic acid, decanoic acid, undecanoic acid, dodcanoic acid, tridecanoic acid, tetradecanoic acid, pentadecanoic acid, hexadecanoic acid, heptadecanoic acid, octadecanoic acid, oleic acid, linoleic acid, arachidonic acid, cis-4,7,10,13,16,19-docosahexanoic acid, vitamin A, vitamin E, cholesterol etc.). In some embodiments, the lipophilic moiety is a C₄-C₃₀ alcohol or C₄-C₁₈ alcohol (e.g., hexanol, heptanol, octanol, nonanol, decanol, undecanol, dodcanol, tridecanol, tetradecanol, pentadecanol, hexadecanol, heptadecanol, octadecanol, oleyl alcohol, linoleyl alcohol, arachidonic alcohol, cis-4,7,10,13,16,19-docosahexanol, retinol, vitamin E, cholesterol etc.).

[0028] In some embodiments, the ligand (such as the ASGPR ligand) or the lipophilic moiety may be conjugated to any part of the dsRNA agent, e.g., a nucleobase, sugar moiety, or internucleosidic linkage. The ligand (such as the ASGPR ligand) or the lipophilic moiety may be conjugated to the dsRNA agent via a direct attachment to the nucleobase, ribosugar, or internucleosidic linkage of the dsRNA agent. Alternatively, the ligand (such as the ASGPR ligand) or the lipophilic moiety may be conjugated to the dsRNA agent via a non-ribose replacement unit, such as a linker or a carrier.

[0029] In certain embodiments, the ligand (such as the ASGPR ligand) or the lipophilic moiety are conjugated to the dsRNA agent via one or more linkers (tethers).

[0030] In some embodiments, the ligand (such as the ASGPR ligand) or the lipophilic moiety is conjugated to the dsRNA agent via a linker a linker containing an ether, thioether, urea, carbonate, amine, amide, maleimide-thioether, disulfide, phosphodiester, sulfonamide linkage, a product of a click reaction (e.g., a triazole from the azide-alkyne cycloaddition), or carbamate.

[0031] In some embodiments, at least one of the linkers (tethers) is a redox cleavable linker (such as a reductively cleavable linker; e.g., a disulfide group), an acid cleavable linker (e.g., a hydrazone group, an ester group, an acetal group, or a ketal group), an esterase cleavable linker (e.g., an ester group), a phosphatase cleavable linker (e.g., a phosphate group), or a peptidase cleavable linker (e.g., a peptide bond).

[0032] In other embodiments, at least one of the linkers (tethers) is a bio-cleavable linker selected from the group consisting of DNA, RNA, disulfide, amide, functionalized monosaccharides or oligosaccharides of galactosamine, glucosamine, glucose, galactose, mannose, and combinations thereof.

[0033] In certain embodiments, the ligand (such as the ASGPR ligand) or the lipophilic moiety is conjugated to the dsRNA agent via a carrier that replaces one or more nucleotide(s). The carrier can be a cyclic group or an acyclic group. In one embodiment, the cyclic group is selected from the group consisting of pyrrolidinyl, pyrazolinyl, pyrazolidinyl, imidazolinyl, imidazolidinyl, piperidinyl, piperazinyl, [1,3]dioxolane, oxazolidinyl, isoxazolidinyl, morpholinyl, thiazolidinyl, isothiazolidinyl, quinoxalinyl, pyridazinonyl, tetrahydrofuryl, and decalin. In one embodiment, the acyclic group is a moiety based on a serinol backbone or a diethanolamine backbone.

[0034] In one embodiment, the ligand (such as the ASGPR ligand) or the lipophilic moiety is conjugated to one or more internal positions on at least one strand, which include all positions except the terminal two positions from each end of the strand. In one embodiment, the ligand (such as the ASGPR ligand) or the lipophilic moiety is conjugated to one or more internal positions on at least one strand, which include all positions except the terminal three positions from each end of the strand.

[0035] In one embodiment, at least one lipophilic moiety is conjugated to one or more positions of at least one end of the duplex region, which include all positions within the duplex region, but not include the overhang region or the carrier that replaces the terminal nucleotide on the 3′ end of the sense strand. In one embodiment, at least one lipophilic moiety is conjugated on the sense strand within the first five base pairs at the 5′-end of the antisense strand of the duplex region.

[0036] In one embodiment, at least one lipophilic moiety is conjugated on the sense strand within the first four base pairs at the 5′-end of the antisense strand of the duplex region.

[0037] In one embodiment, at least one lipophilic moiety is conjugated on the sense strand within the first three base pairs at the 5′-end of the antisense strand of the duplex region.

[0038] In one embodiment, at least one lipophilic moiety is conjugated on the sense strand within the first two base pairs at the 5′-end of the antisense strand of the duplex region.

[0039] In one embodiment, at least one lipophilic moiety is conjugated on the sense strand on the first base pair at the 5′-end of the antisense strand of the duplex region.

[0040] In one embodiment, the lipophilic moiety is conjugated to one or more internal positions on at least one strand, which exclude the cleavage site region of the sense strand. For instance, the internal positions exclude positions 9-12 counting from the 5′-end of the sense strand. For example, the internal positions exclude positions 9-11 counting from the 5′-end of the sense strand. Alternatively, the internal positions exclude positions 11-13 counting from the 3′-end of the sense strand.

[0041] In one embodiment, the lipophilic moiety is conjugated to one or more internal positions on at least one strand, which exclude the cleavage site region of the antisense strand. For instance, the internal positions exclude positions 12-14 counting from the 5′-end of the antisense strand.

[0042] In one embodiment, the lipophilic moiety is conjugated to one or more internal positions on at least one strand, which exclude positions 11-13 on the sense strand, counting from the 3′-end, and positions 12-14 on the antisense strand, counting from the 5′-end.

[0043] In one embodiment, one or more lipophilic moieties are conjugated to one or more of the following internal positions: positions 4-8 and 13-18 on the sense strand, and positions 6-10 and 15-18 on the antisense strand, counting from the 5′ end of each strand.

[0044] In one embodiment, one or more lipophilic moieties are conjugated to one or more of the following internal positions: positions 5, 6, 7, 15, and 17 on the sense strand, and positions 15 and 17 on the antisense strand, counting from the 5′ end of each strand.

[0045] In some embodiments, the carrier replaces one or more nucleotide(s) in the dsRNA agent.

[0046] In some embodiments, the carrier replaces one or more nucleotide(s) in the internal position(s) of the dsRNA agent.

[0047] In other embodiments, the carrier replaces the nucleotides at the terminal end of the sense strand or antisense strand. In one embodiment, the carrier replaces the terminal nucleotide on the 3′ end of the sense strand, thereby functioning as an end cap protecting the 3′ end of the sense strand. In one embodiment, the carrier is a cyclic group having an amine, for instance, the carrier may be pyrrolidinyl, pyrazolinyl, pyrazolidinyl, imidazolinyl, imidazolidinyl, piperidinyl, piperazinyl, [1,3]dioxolanyl, oxazolidinyl, isoxazolidinyl, morpholinyl, thiazolidinyl, isothiazolidinyl, quinoxalinyl, pyridazinonyl, tetrahydrofuranyl, or decalinyl.

[0048] In some embodiments, the lipophilic moiety (or lipophilic monomer including the lipophilic moiety and a carrier and/or linker that conjugates the lipophilic moiety to the dsRNA agent) is selected from the group consisting of

[chemical structure]

[chemical structure]

[chemical structure]

[chemical structure]

[chemical structure]

[chemical structure]

[chemical structure]

[0049] wherein:
   [0050] m is an integer of 0-8;
   [0051] n is an integer of 1-21;
   [0052] R₂′ is H, OH, F, OMe, O-methoxyalkyl, O-allyl, O—N-methylacetamido, O-dimethylaminoethoxyethyl, or O-aminopropyl;
   [0053] B is a modified or unmodified nucleobase;
   [0054] W is an alkyl; and
   [0055] R and R′ are each independently H or alkyl.

[0056] In the above structures for the lipophilic moieties or lipophilic monomers, there may also contain one or more asymmetric centers and thus occur as racemates and racemic mixtures, single enantiomers, individual diastereomers and diastereomeric mixtures. All such isomeric forms are expressly included.

[0057] In the above structures for the lipophilic moieties or lipophilic monomers, the alkylene chain can contain one or more unsaturated bonds.

[0058] Integer m is 0-8. Integer n is 1-21. R₂′ may be any functional group that is an acceptable 2′-modification for a ribose sugar, such as a 2′-O-methoxyalkyl (e.g., 2′-O-methoxymethyl, 2′-O-methoxyethyl, or 2′-O-2-methoxypropanyl) modification, 2′-O-allyl modification, 2′-C-allyl modification, 2′-fluoro modification, 2′-O—N-methylacetamido (2′-O-NMA) modification, 2′-O-dimethylaminoethoxyethyl (2′-O-DMAEOE) modification, 2′-O-aminopropyl (2′-O-AP) modification, or 2′-ara-F modification. For instance, R₂′ may be H, OH, F, OMe, O-methoxyalkyl, O-allyl, O—N-methylacetamido, O-dimethylaminoethoxyethyl, or O-aminopropyl. B is a modified or unmodified nucleobase. W is an alkyl group such as a C₁-C₄ alkyl (e.g., methyl, ethyl, propyl, isopropyl, butyl, isobutyl, t-butyl). R, R′, and R″ are each independently H or an alkyl group such as a C₁-C₄ alkyl (e.g., methyl, ethyl, propyl, isopropyl, t-butyl).

[0059] In certain embodiments, the lipophilic moiety (or lipophilic monomer including the lipophilic moiety and a carrier and/or linker that conjugates the lipophilic moiety to the dsRNA agent) has the formula

[chemical structure]

wherein n is 1-21 (e.g., 4-14), and B is a modified or unmodified nucleobase. In one embodiment, the lipophilic moiety or lipophilic monomer has the formula

[chemical structure]

[0060] In certain embodiments, the lipophilic moiety (or lipophilic monomer including the lipophilic moiety and a carrier and/or linker that conjugates the lipophilic moiety to the dsRNA agent) has the formula

[chemical structure]

wherein n is 1-21 (e.g., 1-13), and B is a modified or unmodified nucleobase. In one embodiment, the lipophilic monomer is according to the structure,

[chemical structure]

[0061] In certain embodiments, the lipophilic moiety (or lipophilic monomer including the lipophilic moiety and a carrier and/or linker that conjugates the lipophilic moiety to the dsRNA agent) has the formula

[chemical structure]

wherein n is 1-21 (e.g., 1-13), and B is a modified or unmodified nucleobase.

[0062] In some embodiments, the sense and antisense strands of the dsRNA agent are each 15 to 30 nucleotides in length. In one embodiment, the sense and antisense strands of a dsRNA agent are each 19 to 25 nucleotides in length. In one embodiment, the sense and antisense strands of the dsRNA agent are each 21 to 23 nucleotides in length.

[0063] In some embodiments, the dsRNA agent comprises a single-stranded overhang on at least one of the termini, e.g., 3′ and/or 5′ overhang(s) of 1-10 nucleotides in length, for instance, an overhang of 1, 2, 3, 4, 5, or 6 nucleotides. In some embodiments, both strands have at least one stretch of 1-5 (e.g., 1, 2, 3, 4, or 5) single-stranded nucleotides in the double stranded region. In one embodiment, the single-stranded overhang is 1, 2, or 3 nucleotides in length.

[0064] In some embodiments, the dsRNA agent may also have a blunt end. In some embodiments, the dsRNA agent comprises a single-stranded overhang on one of the termini, and a blunt end on the other termini.

[0065] In some embodiments, the dsRNA agent may have a blunt end, located at the 5′-end of the antisense strand (or the 3′-end of the sense strand), or vice versa.

[0066] In one embodiment, the dsRNA agent comprises a 3′ overhang at the 3′-end of the antisense strand, and optionally a blunt end at the 5′-end of the antisense strand. In one embodiment, the dsRNA agent has a 5′ overhang at the 5′-end of the sense strand, and optionally a blunt end at the 5′-end of the antisense strand.

[0067] In one embodiment, the dsRNA agent has two blunt ends at both ends of the iRNA duplex.

[0068] In one embodiment, the sense strand of the dsRNA agent is 21-nucleotides in length, and the antisense strand is 23-nucleotides in length, wherein the strands form a double-stranded region of 21 consecutive base pairs having a 2-nucleotide long single-stranded overhangs at the 3′-end.

[0069] The dsRNA agent comprises at least one TNA (threose nucleic acid) at position 1 of the antisense strand, counting from the 5′ end.

[0070] In some embodiments, the TNA has the structure of:

[chemical structure]

wherein B is an optionally modified nucleobase, and * represents the bond to the internucleotide linkage to the subsequent nucleotide.

[0071] In some embodiments, the TNA may be a 4′-modified TNA having the structure of:

[chemical structure]

wherein B is an optionally modified nucleobase, and * represents the bond to the internucleotide linkage to the subsequent nucleotide, and wherein R is an optionally substituted alkyl. In some embodiments, the 4′-modified TNA has the structure of:

[chemical structure]

[0072] In some embodiments, the TNA may be a 4′-modified TNA having the structure of:

[chemical structure]

wherein each R is independently an optionally substituted alkyl, B is an optionally modified nucleobase, and * represents the bond to the internucleotide linkage to the subsequent nucleotide. In some embodiments, at least one R is a linear or branched C₁-C₃ alkyl. In some embodiments, each R is independently a linear or branched C₁-C₃ alkyl. In one embodiment, each R is methyl.

[0073] In some embodiments, the TNA may be a TNA triphosphate derivative having the structure of

[chemical structure]

wherein X is independently O or S; each of R₁ and R₂ is independently H, alkyl (e.g., C₁-C₃ alkyl such as methyl), alkoxy (e.g., C₁-C₃alkoxy), alkenyl (e.g., C₂-C₄ alkenyl such as vinyl), alkynyl (e.g., C₂-C₄alkynyl such as ethynyl), aryl, or alkyl substituted with alkoxy (alkoxyalkyl (e.g., C₁-C₃alkoxy C₁-C₃alkyl)), alkenyl (alkenyl alkyl (e.g., C₂-C₄ alkenyl C₁-C₃alkyl such as allyl)), or alkynyl (alkynyl alkyl (e.g., C₂-C₄ alkynyl C₁-C₃alkyl such as propargyl)). In one embodiment, each X is O. In one embodiment, each X is S. In one embodiment, one X is O and the other two Xs are S. In one embodiment, one X is S and the other two Xs are O. In some embodiments, each of R₁ and R₂ is independently H, methyl, alkyl, alkoxy alkyl, vinyl, ethynyl, allyl, propargyl, aryl. B is a natural nucleobase or with modifications as defined herein. In some embodiments, B is one of the following structures:

[chemical structure]

[0074] In some embodiment, the dsRNA agent further comprises a TNA triphosphate derivative having the structure of

[chemical structure]

wherein the definitions of X, B, R₁ and R₂ are the same as defined in the TNA triphosphate derivative formula above.

[0075] In some embodiments, in all the above TNA formulas, B is a natural nucleobase, such as

[chemical structure]

[0076] In some embodiments, in all the above TNA formulas, B is a purine with modifications. Exemplary structures for B are:

[chemical structure]

[0077] In some embodiments, in all the above TNA formulas, B is a pyrimidine with modifications. Exemplary structures for B are:

[chemical structure]

[0078] In some embodiments, in all the above TNA formulas, B has a structure of

[chemical structure]

R^{b} may comprise a lipophilic moiety, a carbohydrate, a folate, or a glutamate urea (PUPTA). For instance, R^{b} may be a lipophilic moiety containing a containing a saturated or unsaturated C₄-C₃₀ hydrocarbon chain, such as a saturated or unsaturated C₁₆ hydrocarbon chain.

[0079] In some embodiments, R^{b} is one of the following:

[chemical structure]

[chemical structure]

[chemical structure]

[chemical structure]

[0080] In some embodiments, R^{b} has a formula of

[chemical structure]

wherein s is 1-10, and Ln is one of the following:

[chemical structure]

[0081] In some embodiments, in the above 4′-modified TNA formulas, R is C₁-C₆ alkyl, optionally substituted with one or more substituents selected from the group consisting of alkenyl, alkynyl, aryl, heteroaryl, OR^{a}, halo, NR′R″, and CR′R″R′″, wherein R′, R″, and R′″ are each independently H, alkyl, halo, or COR^{a}, and R^{a} is H, alkyl, or alkoxyalkyl, and wherein each substituent is optionally substituted with one or more of C(O), N(H), halogen, alkyl, alkenyl, alkynyl, aryl, heteroaryl, a lipophilic moiety, a carbohydrate, and/or a vitamin.

[0082] In some embodiments, in the above 4′-modified TNA formulas, R is methyl, optionally substituted with one or more substituents selected from the group consisting of alkenyl, alkynyl, aryl, heteroaryl, OR^{a}, halo, NR′R″, and CR′R″R′″, wherein R′, R″, and R′″ are each independently H, alkyl, halo, or COR^{a}, and R^{a} is H, alkyl, or alkoxyalkyl, and wherein each substituent is optionally substituted with one or more of C(O), N(H), halogen, alkyl, alkenyl, alkynyl, aryl, heteroaryl, a lipophilic moiety, a carbohydrate, and/or a vitamin.

[0083] In one embodiment, in the above 4′-modified TNA formulas, R is methyl, and wherein R is in (R) or (S) configuration. The 4′-modified TNA has the structure of

[chemical structure]

[0084] In some embodiments, in the above 4′-modified TNA formulas, R is methyl substituted with hydroxyl, alkoxy, or alkoxyalkoxy, and wherein R is in (R) or (S) configuration. In one embodiment, the 4′-modified TNA has the structure of

[chemical structure]

[0085] In some embodiments, in the above 4′-modified TNA formulas, R is C₁-C₃ alkyl substituted with one or more halogen groups, and wherein R is in (R) or (S) configuration. In one embodiment, the 4′-modified TNA has the structure of

[chemical structure]

[0086] In some embodiments, in the above 4′-modified TNA formulas, R is methyl substituted with an alkenyl or alkynyl, and wherein R is in (R) or (S) configuration. In one embodiment, the 4′-modified TNA has the structure of

[chemical structure]

[0087] In some embodiments, in the above 4′-modified TNA formulas, R is methyl substituted with a triazoryl group, wherein the triazoryl group has a N atom optionally substituted with one or more of C(O), N(H), alkyl, alkenyl, alkynyl, aryl, heteroaryl, a lipophilic moiety, a carbohydrate, and/or a vitamin, and wherein R is in (R) or (S) configuration. In one embodiment, the 4′-modified TNA has the structure of

[chemical structure]

wherein R₁ is one of the following:

[chemical structure]

[chemical structure]

[chemical structure]

[chemical structure]

and
[0088] n is 1-10.

[0089] In some embodiments, in the above 4′-modified TNA formulas, R is methyl substituted with an amino group, optionally substituted with one or more of C(O), N(H), halogen, alkyl, alkenyl, alkynyl, aryl, heteroaryl, a lipophilic moiety, a carbohydrate, and/or a vitamin, and wherein R is in (R) or (S) configuration. In one embodiment, the 4′-modified TNA has the structure of

[chemical structure]

wherein R₁ is one of the following:

[chemical structure]

[chemical structure]

[0090] In some embodiments, the dsRNA agent further comprises a phosphate or phosphate mimic at the 5′-end of the antisense strand. In one embodiment, the phosphate mimic is a 5′-end vinyl phosphonate (VP).

[0091] In some embodiments, the 5′-end of the antisense strand of the dsRNA agent does not contain a phosphate or phosphate mimic (e.g., a 5′-end phosphate or a 5′-end vinyl phosphonate (VP)).

[0092] In some embodiments, the dsRNA agent further comprises at least one terminal, chiral phosphorus atom.

[0093] A site specific, chiral modification to the internucleotide linkage may occur at the 5′ end, 3′ end, or both the 5′ end and 3′ end of a strand. This is being referred to herein as a “terminal” chiral modification. The terminal modification may occur at a 3′ or 5′ terminal position in a terminal region, e.g., at a position on a terminal nucleotide or within the last 2, 3, 4, 5, 6, 7, 8, 9 or 10 nucleotides of a strand. A chiral modification may occur on the sense strand, antisense strand, or both the sense strand and antisense strand. Each of the chiral pure phosphorus atoms may be in either Rp configuration or Sp configuration, and combination thereof. More details regarding chiral modifications and chirally-modified dsRNA agents can be found in PCT/US18/67103, entitled “Chirally-Modified Double-Stranded RNA Agents,” filed Dec. 21, 2018, which is incorporated herein by reference in its entirety.

[0094] In some embodiments, the dsRNA agent further comprises a terminal, chiral modification occurring at the first internucleotide linkage at the 3′ end of the antisense strand, having the linkage phosphorus atom in Sp configuration; a terminal, chiral modification occurring at the first internucleotide linkage at the 5′ end of the antisense strand, having the linkage phosphorus atom in Rp configuration; and a terminal, chiral modification occurring at the first internucleotide linkage at the 5′ end of the sense strand, having the linkage phosphorus atom in either Rp configuration or Sp configuration.

[0095] In one embodiment, the dsRNA agent further comprises a terminal, chiral modification occurring at the first and second internucleotide linkages at the 3′ end of the antisense strand, having the linkage phosphorus atom in Sp configuration; a terminal, chiral modification occurring at the first internucleotide linkage at the 5′ end of the antisense strand, having the linkage phosphorus atom in Rp configuration; and a terminal, chiral modification occurring at the first internucleotide linkage at the 5′ end of the sense strand, having the linkage phosphorus atom in either Rp or Sp configuration.

[0096] In one embodiment, the dsRNA agent further comprises a terminal, chiral modification occurring at the first, second, and third internucleotide linkages at the 3′ end of the antisense strand, having the linkage phosphorus atom in Sp configuration; a terminal, chiral modification occurring at the first internucleotide linkage at the 5′ end of the antisense strand, having the linkage phosphorus atom in Rp configuration; and a terminal, chiral modification occurring at the first internucleotide linkage at the 5′ end of the sense strand, having the linkage phosphorus atom in either Rp or Sp configuration.

[0097] In one embodiment, the dsRNA agent further comprises a terminal, chiral modification occurring at the first and second internucleotide linkages at the 3′ end of the antisense strand, having the linkage phosphorus atom in Sp configuration; a terminal, chiral modification occurring at the third internucleotide linkages at the 3′ end of the antisense strand, having the linkage phosphorus atom in Rp configuration; a terminal, chiral modification occurring at the first internucleotide linkage at the 5′ end of the antisense strand, having the linkage phosphorus atom in Rp configuration; and a terminal, chiral modification occurring at the first internucleotide linkage at the 5′ end of the sense strand, having the linkage phosphorus atom in either Rp or Sp configuration.

[0098] In one embodiment, the dsRNA agent further comprises a terminal, chiral modification occurring at the first and second internucleotide linkages at the 3′ end of the antisense strand, having the linkage phosphorus atom in Sp configuration; a terminal, chiral modification occurring at the first, and second internucleotide linkages at the 5′ end of the antisense strand, having the linkage phosphorus atom in Rp configuration; and a terminal, chiral modification occurring at the first internucleotide linkage at the 5′ end of the sense strand, having the linkage phosphorus atom in either Rp or Sp configuration.

[0099] In some embodiments, the internucleotide linkage between the nucleotides at position 1 and position 2 of the 5′ end of the antisense strand is not a phosphorothioate linkage.

[0100] In some embodiments, the dsRNA agent has at least two phosphorothioate internucleotide linkages at the first five, four, three, or two nucleotides on the antisense strand (counting from the 5′ end).

[0101] In some embodiments, the dsRNA agent has at least two phosphorothioate internucleotide linkages at the first five, four, three, or two nucleotides on the antisense strand (counting from the 3′ end).

[0102] In some embodiments, the antisense strand comprises two blocks of one, two, or three phosphorothioate internucleotide linkages separated by 1, 2, 3, 4, 5, 6, 7, 8, 9, 10, 11, 12, 13, 14, 15, 16, 17, or 18 phosphate internucleotide linkages.

[0103] In some embodiments, the sense strand comprises at least one phosphorothioate linkage at the 3′-end. In some embodiments, the sense strand comprises at least two phosphorothioate linkages at the 3′-end. In some embodiments, one or more lipophilic monomer are located on the 3′-end of the sense strand. In one embodiment, the first phosphorothioate is between the lipophilic monomer and the first nucleotide from the 3′-end of the sense strand.

[0104] In some embodiments, the sense strand comprises at least two phosphorothioate internucleotide linkages between the first five, four, three, or two nucleotides, counting from the 5′ end of the sense strand.

[0105] In some embodiments, at least one strand comprises one or more phosphorodithioates (PS2) linkages. In some embodiments, the sense strand comprises one or more (e.g., 1, 2, 3, 4, 5, 6, 7, 8, 9, 10, 11, 12, 13, 14, 15 or more, and up to including all) phosphorodithioates (PS₂) linkages. In some embodiments, the antisense strand comprises one or more (e.g., 1, 2, 3, 4, 5, 6, 7, 8, 9, 10, 11, 12, 13, 14, 15 or more, and up to including all) phosphorodithioates (PS₂) linkages. In some embodiments, both the sense and the antisense strands comprise one or more (e.g., 1, 2, 3, 4, 5, 6, 7, 8, 9, 10, 11, 12, 13, 14, 15 or more, and up to including all) phosphorodithioates (PS₂) linkages.

[0106] In some embodiments, the antisense strand comprises at least two phosphorodithioates internucleotide linkages at the first five, four, three, or two nucleotides on the antisense strand (counting from the 5′ end). In some embodiments, the antisense strand comprises at least two phosphorodithioates internucleotide linkages at the first five, four, three, or two nucleotides on the antisense strand (counting from the 3′ end).

[0107] In some embodiments, the sense strand comprises at least one phosphorodithioates linkage at the 3′-end. In some embodiments, the sense strand comprises at least two phosphorodithioates linkages at the 3′-end. In some embodiments, one or more lipophilic monomer are located on the 3′-end of the sense strand. In one embodiment, the first phosphorodithioates linkage is between the lipophilic monomer and the first nucleotide from the 3′-end of the sense strand. In some embodiments, the sense strand comprises at least two phosphorodithioates internucleotide linkages between the first five, four, three, or two nucleotides, counting from the 5′ end of the sense strand.

[0108] In some embodiments, the dsRNA agent further comprises a targeting ligand that targets a receptor which mediates delivery to a specific CNS tissue. In one embodiment, the targeting ligand is selected from the group consisting of Angiopep-2, lipoprotein receptor related protein (LRP) ligand, bEnd.3 cell binding ligand, transferrin receptor (TfR) ligand, manose receptor ligand, glucose transporter protein, and LDL receptor ligand.

[0109] In some embodiments, the dsRNA agent further comprises a targeting ligand that targets a receptor which mediates delivery to an ocular tissue. In one embodiment, the targeting ligand is selected from the group consisting of trans-retinol, RGD peptide, LDL receptor ligand, and carbohydrate-based ligands. In one embodiment, the targeting ligand is a RGD peptide, such as H-Gly-Arg-Gly-Asp-Ser-Pro-Lys-Cys-OH (SEQ ID NO.: 1) or Cyclo(-Arg-Gly-Asp-D-Phe-Cys) (SEQ ID NO.: 2).

[0110] In some embodiments, the dsRNA agent further comprises a targeting ligand that targets a liver tissue. In some embodiments, the targeting ligand is a carbohydrate-based ligand. In one embodiment, the targeting ligand is a GalNAc conjugate.

[0111] In some embodiments, 100%, 95%, 90%, 85%, 80%, 75%, 70%, 65%, 60%, 55%, 50%, 45%, 40%, 35% or 30% of the antisense or sense strand is modified. For example, when 50% of the strand is modified, 50% of all nucleotides present in the strand contain a modification as described herein.

[0112] In one embodiment, at least 30%, 35%, 40%, 45%, 50%, 55%, 60%, 65%, 70%, 75%, 80%, 85%, 90%, 95%, or virtually 100% of the nucleotides of the dsRNA agent is independently modified with 2′-O-methyl, 2′-O-allyl, 2′-deoxy, or 2′-fluoro.

[0113] In one embodiment, at least 30%, 35%, 40%, 45%, 50%, 55%, 60%, 65%, 70%, 75%, 80%, 85%, 90%, 95%, or virtually 100% of the nucleotides of the dsRNA agent is independently modified with LNA, CeNA, 2′-methoxyethyl, or 2′-deoxy.

[0114] In some embodiments, at least 30%, 35%, 40%, 45%, 50%, 55%, 60%, 65%, 70%, 75%, 80%, 85%, 90%, 95%, or virtually 100% of the nucleotides of the dsRNA agent are 2′-O-methyl modified nucleotides.

[0115] In some embodiments, the dsRNA agent has less than 12, less than 10, less than 8, less than 6, less than 4, less than 2, or no 2′-F modifications on the sense strand. In some embodiments, the dsRNA agent has less than 12, less than 10, less than 8, less than 6, less than 4, less than 2, or no 2′-F modifications on the antisense strand.

[0116] In some embodiments, the dsRNA agent has one or more 2′-F modifications on any position of the sense strand or antisense strand.

[0117] In some embodiments, the dsRNA agent has less than 20%, less than 15%, less than 10%, less than 5% non-natural nucleotide, or substantially no non-natural nucleotide. Examples of non-natural nucleotide include acyclic nucleotides, LNA, HNA, CeNA, 2′-O-methoxyalkyl (e.g., 2′-O-methoxymethyl, 2′-O-methoxyethyl, or 2′-O-2-methoxypropanyl), 2′-O-allyl, 2′-C-allyl, 2′-fluoro, 2′-O—N-methylacetamido (2′-O—NMA), a 2′-O-dimethylaminoethoxyethyl (2′-O-DMAEOE), 2′-O-aminopropyl (2′-O-AP), 2′-ara-F, L-nucleoside modification (such as 2′-modified L-nucleoside, e.g., 2′-deoxy-L-nucleoside), BNA abasic sugar, abasic cyclic and open-chain alkyl.

[0118] In some embodiments, the dsRNA agent has greater than 80%, greater than 85%, greater than 90%, greater than 95%, or virtually 100% natural nucleotides. For the purpose of these embodiments, natural nucleotides can include those having 2′-OH, 2′-deoxy, and 2′-OMe.

[0119] In one embodiment, the dsRNA agent comprises a sense strand and antisense strand each having a length of 15-30 nucleotides; at least two phosphorothioate internucleotide linkages at the first five nucleotides on the antisense strand (counting from the 5′ end); wherein the duplex region is between 19 to 25 base pairs (preferably 19, 20, 21 or 22); wherein the dsRNA agent has less than 20%, less than 15%, less than 10%, less than 5% non-natural nucleotide, or substantially no non-natural nucleotide.

[0120] In one embodiment, the dsRNA agent comprises a sense strand and antisense strand each having a length of 15-30 nucleotides; at least two phosphorothioate internucleotide linkages at the first five nucleotides on the antisense strand (counting from the 5′ end); wherein the duplex region is between 19 to 25 base pairs (preferably 19, 20, 21 or 22); wherein the dsRNA agent has greater than 80%, greater than 85%, greater than 95%, or virtually 100% natural nucleotides, such as those having 2′-OH, 2′-deoxy, or 2′-OMe.

[0121] In some embodiments, the antisense strand contains at least one unlocked nucleic acids (UNA) or glycerol nucleic acid (GNA) modification, e.g., at the seed region of the antisense strand. In one embodiment, the seed region is at positions 2-8 (or positions 5-7) of the 5′-end of the antisense strand.

[0122] In some embodiments, the dsRNA agent contains at least one 4′-modified TNA having the structure of

[chemical structure]

on at least one of the sense or antisense strand. The R group in the 4′-modified TNA formula may be in (R) or (S) configuration. In one embodiment, R is methyl. In one embodiment, the 4′-modified TNA has the structure of

[chemical structure]

[0123] In some embodiments, the R group in the 4′-modified TNA formula is in (S) configuration

[chemical structure]

and at least one 4′-modified TNA is at one of positions 1-9 and 12-15 of the sense strand, counting from the 5′ end of the sense strand.

[0124] In some embodiments, the R group in the 4′-modified TNA formula is in (S) configuration

[chemical structure]

and at least one 4′-modified TNA is at one of positions 3, 5-11, 14, 16, 18, and 20 of the antisense strand, counting from the 5′ end of the antisense strand.

[0125] In some embodiments, the R group in the 4′-modified TNA formula is in (R) configuration

[chemical structure]

and at least one 4′-modified TNA is at one of positions 1-10 and 12-21 of the sense strand, counting from the 5′ end of the sense strand.

[0126] In some embodiments, the R group in the 4′-modified TNA formula is in (R) configuration

[chemical structure]

and at least one 4′-modified TNA is at one of positions 2-10, 19-21, and 23 of the antisense strand, counting from the 5′ end of the antisense strand.

[0127] Another aspect of the invention relates to a single-stranded oligonucleotide capable of modulating the expression of a target gene, comprising at least one TNA (threose nucleic acid) at position 1, counting from the 5′ end. The single-stranded oligonucleotide comprises one or more lipophilic moieties conjugated, optionally via a linker or carrier.

[0128] Another aspect of the invention relates to a single-stranded oligonucleotide capable of modulating the expression of a target gene, comprising at least one 4′-modified TNA (threose nucleic acid) having the structure of

[chemical structure]

wherein:
[0129] each R is independently an optionally substituted alkyl,
[0130] B is an optionally modified nucleobase, and
[0131] * represents the bond to H or to the internucleotide linkage to the subsequent nucleotide.

[0132] In all the above embodiments, the single-stranded oligonucleotide may be an inhibitory single-stranded oligonucleotide, such as an antisense oligonucleotide (ASO), an antimiR (antagomir) oligonucleotide, microRNA mimic, supermir, aptamer, U1 adaptor, triplex-forming oligonucleotide, RNA activator, immuno-stimulatory oligonucleotide, decoy oligonucleotide, heteroduplex-forming oligonucleotide, or a single-stranded siRNA (ss-siRNA) oligonucleotide.

[0133] In some embodiments, the single-stranded oligonucleotide is an antisense oligonucleotide (ASO). The phrase “antisense oligonucleotide” as used herein, refers to an oligomeric compound that is substantially or 100% complementary to a target sequence of interest. The phrase “antisense strand” includes the antisense region of both oligomeric compounds that are formed from two separate strands, as well as unimolecular oligomeric compounds that are capable of forming hairpin or dumbbell type structures.

[0134] All the above embodiments relating to the dsRNA agent, the TNA modification, the ligands and the lipophilic moieties and their conjugation to the dsRNA agent, in the above aspects of the invention relating to the dsRNA agent (modified by the TNA) are suitable in these aspects of the invention relating to a single-stranded oligonucleotide (e.g., an antisense oligonucleotide (ASO).

[0135] Another aspect of the invention relates to a method of modulating the expression of a target gene in a cell, comprising contacting said cell with, or administering to said cell, a dsRNA agent comprising a sense strand and an antisense strand sufficiently complementary to at least one portion of a mRNA of the target gene, each strand having 14 to 40 nucleotides, wherein the antisense comprises at least one TNA (threose nucleic acid), optionally at position 1, counting from the 5′ end.

[0136] Another aspect of the invention relates to a method of modulating the expression of a target gene in a cell, comprising contacting said cell with, or administering to said cell, a single-stranded oligonucleotide comprising at least one TNA (threose nucleic acid) at position 1, counting from the 5′ end. In some embodiments, the single-stranded oligonucleotide may be an inhibitory single-stranded oligonucleotide, such as an antisense oligonucleotide (ASO), an antimiR (antagomir) oligonucleotide, microRNA mimic, supermir, aptamer, U1 adaptor, triplex-forming oligonucleotide, RNA activator, immuno-stimulatory oligonucleotide, decoy oligonucleotide, heteroduplex-forming oligonucleotide, or a single-stranded siRNA (ss-siRNA) oligonucleotide. In some embodiments, the single-stranded oligonucleotide is an antisense oligonucleotide (ASO).

[0137] All the above embodiments relating to the dsRNA agent, the single-stranded oligonucleotide, the TNA modification, the ligands and the lipophilic moieties and their conjugation to the dsRNA agent or the single-stranded oligonucleotide, in the above aspects of the invention relating to the dsRNA agent (modified by the TNA) and the single-stranded oligonucleotide (modified by the TNA) are suitable in this aspect of the invention relating to a method of modulating the expression of a target gene in a cell.

[0138] In one embodiment, the cell is an extrahepatic cell.

[0139] In one embodiment, the cell is a hepatic cell.

[0140] Another aspect of the invention relates to a method of modulating the expression of a target gene in a subject, comprising administering to the subject a dsRNA agent comprising a sense strand and an antisense strand sufficiently complementary to at least one portion of a mRNA of the target gene, each strand having 14 to 40 nucleotides, wherein the antisense comprises at least one TNA (threose nucleic acid), optionally at position 1, counting from the 5′ end.

[0141] Another aspect of the invention relates to a method of modulating the expression of a target gene in a subject, comprising administering to the subject a single-stranded oligonucleotide comprising at least one TNA (threose nucleic acid), optionally at position 1, counting from the 5′ end. In some embodiments, the single-stranded oligonucleotide may be an inhibitory single-stranded oligonucleotide, such as an antisense oligonucleotide (ASO), an antimiR (antagomir) oligonucleotide, microRNA mimic, supermir, aptamer, U1 adaptor, triplex-forming oligonucleotide, RNA activator, immuno-stimulatory oligonucleotide, decoy oligonucleotide, heteroduplex-forming oligonucleotide, or a single-stranded siRNA (ss-siRNA) oligonucleotide. In some embodiments, the single-stranded oligonucleotide is an antisense oligonucleotide (ASO).

[0142] All the above embodiments relating to the dsRNA agent, the single-stranded oligonucleotide, the TNA modification, the ligands and the lipophilic moieties and their conjugation to the dsRNA agent or the single-stranded oligonucleotide in the above aspects of the invention relating to the dsRNA agent (modified by the TNA) or the single-stranded oligonucleotide (modified by the TNA) are suitable in this aspect of the invention relating to a method of modulating the expression of a target gene in a subject.

[0143] In some embodiments, the dsRNA agent is administered extrahepatically.

[0144] In some embodiments, the dsRNA agent is administered hepatically.

[0145] In one embodiment, the dsRNA agent is administered intrathecally. By intrathecal administration of the dsRNA agent, the method can reduce the expression of a target gene in a brain or spine tissue, for instance, cortex, cerebellum, cervical spine, lumbar spine, and thoracic spine.

[0146] In some embodiments, exemplary target genes are APP, ATXN2, C9orf72, TARDBP, MAPT(Tau), HTT, SNCA, FUS, ATXN3, ATXN1, SCA1, SCA7, SCA8, MeCP2, PRNP, SOD1, DMPK, TTR, SCN9A, LRRK2, GPR75, APOE, SCD5, and GSK3α. To reduce the expression of these target genes in the subject, the dsRNA agent can be administered intravitreally. By intravitreal administration of the dsRNA agent, the method can reduce the expression of the target gene in an ocular tissue.

[0147] Another aspect of the invention relates to a method of treating a subject having a CNS disorder, comprising administering to the subject a therapeutically effective amount of a double-stranded RNA agent, thereby treating the subject. The dsRNA agent comprises a sense strand and an antisense strand sufficiently complementary to at least one portion of a mRNA of the target gene, each strand having 14 to 40 nucleotides, wherein the antisense comprises at least one TNA (threose nucleic acid) at position 1, counting from the 5′ end.

[0148] Another aspect of the invention relates to a method of treating a subject having a CNS disorder, comprising administering to the subject a therapeutically effective amount of a single-stranded oligonucleotide, thereby treating the subject. The single-stranded oligonucleotide comprises at least one TNA (threose nucleic acid), optionally at position 1, counting from the 5′ end. In some embodiments, the single-stranded oligonucleotide may be an inhibitory single-stranded oligonucleotide, such as an antisense oligonucleotide (ASO), an antimiR (antagomir) oligonucleotide, microRNA mimic, supermir, aptamer, U1 adaptor, triplex-forming oligonucleotide, RNA activator, immuno-stimulatory oligonucleotide, decoy oligonucleotide, heteroduplex-forming oligonucleotide, or a single-stranded siRNA (ss-siRNA) oligonucleotide. In some embodiments, the single-stranded oligonucleotide is an antisense oligonucleotide (ASO).

[0149] All the above embodiments relating to the dsRNA agent, the single-stranded oligonucleotide, the TNA modification, the ligands and the lipophilic moieties and their conjugation to the dsRNA agent or the single-stranded oligonucleotide in the above aspects of the invention relating to the dsRNA agent (modified by the TNA) or the single-stranded oligonucleotide (modified by the TNA) are suitable in this aspect of the invention relating to a method of treating a subject having a CNS disorder. Exemplary CNS disorders that can be treated by the method of the invention include alzheimer, amyotrophic lateral schlerosis (ALS), frontotemporal dementia, huntington, Parkinson, spinocerebellar, prion, and lafora.

### BRIEF DESCRIPTION OF THE DRAWINGS

[0150] FIGS. 1A and 1B show the level of TTR mRNA remaining in primary mouse hepatocytes, 24 hours after the primary mouse hepatocytes were treated with the TNA-modified siRNA duplexes and control siRNA duplexes, under transfection conditions (FIG. 1A) and free uptake conditions (FIG. 1B). The amounts were normalized to the level of TTR mRNA in the cells treated with a non-targeting siRNA. Data are means±standard deviation of four experiments. Free uptake (values normalized to Gapdh; control-treated cells=1). The sequences of the exemplary and control siRNA duplexes are shown in Table 2.

[0151] FIG. 2 shows the serum TTR levels in the mice following administering various exemplary TNA-modified siRNA duplexes and control siRNA duplexes, at a single dose of 1.0 mg/kg, at day −1 (prebleed), day 4, day 7, day 14, and day 21, respectively. Female C57BL6N mice approximately 12 weeks of age were randomly assigned to each group. Animals received a single dose of 1.0 mg/kg siRNA (n=3 per group). At the indicated time pre- or post-dosing, animals were bled and TTR was measured in serum using a sandwich ELISA assay utilizing a lRP-conjugate antibody and 3,3′,5,5′-tetramethylbenzidine for readout at 450 nm. All samples were measured in duplicate, and each data point is the average±standard deviation. Blood samples were obtained from vena facialis at day −1, day 4, day 7, day 14, and day 21; and animals were terminated 21 days post application. The sequences of the exemplary and control siRNA duplexes are shown in Table 2.

[0152] FIG. 3 shows the modeling of TNA at position 1-3 of the antisense strand of the siRNA bound to Ago2. The TNA nucleotides at position AS1 (position 1 of the antisense strand) is highlighted with carbon atoms colored in cyan and within the dashed rectangle. Ago2 is depicted in the ribbon mode. Selected Ago2 side chains are labeled and H-bonds are drawn with thin solid lines.

[0153] FIG. 4 shows the IC50 results of a single 4′-(S)-Me TNA nucleotide incorporation along the length of the sense strand (positions were counted from the 5′ end) on the in vitro siRNA activity.

[0154] FIG. 5 shows the IC50 results of a single 4′-(R)-Me TNA nucleotide incorporation along the length of the sense strand (positions were counted from the 5′ end) on the in vitro siRNA activity.

[0155] FIG. 6 shows the IC50 results of a single 4′-(S)-Me TNA nucleotide incorporation along the length of the antisense strand (positions were counted from the 5′ end) on the in vitro siRNA activity.

[0156] FIG. 7 shows the IC50 results of a single 4′-(R)-Me TNA nucleotide incorporation along the length of the antisense strand (positions were counted from the 5′ end) on the in vitro siRNA activity.

### DETAILED DESCRIPTION

[0157] The inventors have found, inter alia, that placing a TNA modification at position 1 of the antisense strand of a double-strand RNA (dsRNA) agent is well tolerated, and provides the dsRNA agent so modified a high silencing activity even when the TNA-modified dsRNA agent is loaded into RISC in cells where normally a 5′-end phosphate or phosphate mimic modification (e.g., 5′-VP) would be needed. The inventors have surprisingly found that when TNA is introduced in position 1 of the antisense strand, regardless of whether a phosphate group was pre-installed at the 5′ terminus of the antisense strand, the free-uptake silencing activities would be comparable to that of the siRNA with a terminal 5′-phosphorylation. This finding allows the TNA-modified dsRNA agent to be particularly useful in extrahepatic delivery, such as CNS targeting.

[0158] One aspect of the invention provides a dsRNA agent capable of modulating the expression of a target gene, comprising: a sense strand and an antisense strand sufficiently complementary to at least one portion of a mRNA of the target gene, each strand having 14 to 40 nucleotides, wherein the antisense strand comprises at least one TNA (threose nucleic acid) at position 1, counting from the 5′ end.

[0159] Another aspect of the invention provides a double-stranded RNA (dsRNA) agent capable of modulating the expression of a target gene, comprising: a sense strand and an antisense strand sufficiently complementary to at least one portion of a mRNA of the target gene, each strand having 14 to 40 nucleotides, wherein:
[0160] the sense strand comprises at least one 2′-OMe modification at position 1, counting from the 5′ end; and
[0161] the antisense strand comprises at least one TNA (threose nucleic acid) at position 1, counting from the 5′ end.

[0162] Another aspect of the invention relates to a double-stranded RNA (dsRNA) agent capable of modulating the expression of a target gene, comprising a sense strand and
[0163] an antisense strand sufficiently complementary to at least one portion of a mRNA of a target gene. The antisense strand comprises at least one TNA (threose nucleic acid) at position 1, counting from the 5′ end. The dsRNA agent comprises one or more lipophilic moieties conjugated to at least one strand, optionally via a linker or carrier.

[0164] Another aspect of the invention relates to a double-stranded RNA (dsRNA) agent capable of modulating the expression of a target gene, comprising a sense strand and an antisense strand sufficiently complementary to at least one portion of a mRNA of the target gene, each strand having 14 to 40 nucleotides, wherein:
[0165] one of the sense or antisense strand comprises at least one 4′-modified TNA (threose nucleic acid) having the structure of

[chemical structure]

wherein:
[0166] each R is independently an optionally substituted alkyl,
[0167] B is an optionally modified nucleobase, and
[0168] * represents the bond to H or to the internucleotide linkage to the subsequent nucleotide.

### TNA Modification

[0169] α-(L)-threofuranosyl nucleic acid with a (3′-2′) phosphodiester backbone (TNA), are nucleic acid alternatives (Schoning et al. Science 290: 1347 (2000), which is incorporated herein by reference in its entirety). The sugar-phosphate backbone of TNA and, for comparison RNA, are shown in the scheme below.

[chemical structure]

[0170] TNA consists of unnatural four-carbon threose sugar and has a unique sugar-phosphate backbone that allows the formation of stable, antiparallel Watson-Crick duplex structures. TNA also shows efficient cross-pairing with complementary strands of DNA and RNA, and exhibits strong nuclease stability under biologically relevant conditions.

[0171] The dsRNA at least one TNA (threose nucleic acid) at position 1 of the antisense strand, counting from the 5′ end.

[0172] In some embodiments, the TNA has the structure of:

[chemical structure]

wherein B is an optionally modified nucleobase, and * represents the bond to the internucleotide linkage to the subsequent nucleotide.

| | | |
|---|---|---|
| (Tth) | 1-(alpha-L-threofuranosyl)thymine 2′-phosphate | [chemical structure] |
| (Tths) | 1-(alpha-L-threofuranosyl)thymine 2′-phosphorothioate | [chemical structure] |
| (Ath) | 9-(alpha-L-threofuranosyl)adenine 2′-phosphate | [chemical structure] |
| (Aths) | 9-(alpha-L-threofuranosyl)adenine 2′-phosphorothioate | [chemical structure] |
| (Cth) | 1-(alpha-L-threofuranosyl)cytosine 2′-phosphate | [chemical structure] |
| (Cths) | 1-(alpha-L-threofuranosyl)cytosine 2′-phosphorothioate | [chemical structure] |
| (Gth) | 9-(alpha-L-threofuranosyl)guanine 2′-phosphate | [chemical structure] |
| (Gths) | 9-(alpha-L-threofuranosyl)guanine 2′-phosphorothioate | [chemical structure] |

[0173] In some embodiments, the TNA may be a TNA triphosphate derivative having the structure of

[chemical structure]

wherein each X is independently O or S; each of R₁ and R₂ is independently H, alkyl (e.g., C₁-C₃ alkyl such as methyl), alkoxy (e.g., C₁-C₃alkoxy), alkenyl (e.g., C₂-C₄ alkenyl such as vinyl), alkynyl (e.g., C₂-C₄alkynyl such as ethynyl), aryl, or alkyl substituted with alkoxy (alkoxyalkyl (e.g., C₁-C₃alkoxy C₁-C₃alkyl)), alkenyl (alkenyl alkyl (e.g., C₂-C₄ alkenyl C₁-C₃alkyl such as allyl)), or alkynyl (alkynyl alkyl (e.g., C₂-C₄ alkynyl C₁-C₃alkyl such as propargyl)). In one embodiment, each X is O. In one embodiment, each X is S. In one embodiment, one X is O and the other two Xs are S. In one embodiment, one X is S and the other two Xs are O. In some embodiments, each of R₁ and R₂ is independently H, methyl, alkyl, alkoxy alkyl, vinyl, ethynyl, allyl, propargyl, aryl. B is a natural nucleobase or with modifications as defined herein. In some embodiments, B is one of the following structures:

[chemical structure]

[0174] In some embodiment, the dsRNA agent further comprises a TNA triphosphate derivative having the structure of

[chemical structure]

wherein the definitions of X, B, R₁ and R₂ are the same as defined in the TNA triphosphate derivative formula above.

[0175] The TNA triphosphate derivatives can be useful in enzymatic synthesis of oligonucleotides. Enzymatic oligonucleotide synthesis methods using template-independent or dependent polymerases have recently re-emerged (see Mathews et al., “Photo-cleavable nucleotides for primer free enzyme mediated DNA synthesis.” Org. Biomol. Chem. 14: 8278-88 (2016); Mathews et al., “3′-O-Caged 2′-Deoxynucleoside Triphosphates for Light-Mediated, Enzyme-Catalyzed, Template-Independent DNA Synthesis.” Curr. Protoc. Nucleic Acid Chem. 71: 13.17.1-13.17.38 (2017); Palluk et al., “De novo DNA synthesis using polymerase-nucleotide conjugates.” Nat. Biotechnol. 36: 645-650 (2018); which are incorporated herein by reference in their entirety). Enzymatic oligonucleotide synthesis method can bring certain advantages to the oligonucleotide synthesis: the enzymatic synthesis reaction is carried out under hydrated and mild conditions; coupled with the specificity of the enzyme, the enzymatic synthesis can reduce the formation of by-products and the depurination of DNA and other damages, so that longer oligonucleotides can be synthesized directly. As an example, an enzymatic oligonucleotide synthesis can use a polymerase such as terminal deoxynucleotidyl transferase (TdT) to catalyze the stepwise addition of the nucleotide onto the 3′ OH of an oligonucleotide primer. Thus, the TNA triphosphate derivatives may be useful in as a polymerase or part of a polymerase to catalyze chain extension reaction in an enzymatic synthesis of oligonucleotides.

[0176] In some embodiments, the TNA is a 4′-modified TNA having the structure of:

[chemical structure]

wherein B is an optionally modified nucleobase, and * represents the bond to the internucleotide linkage to the subsequent nucleotide, and wherein R is an optionally substituted alkyl. In some embodiments, the 4′-modified TNA has the structure of:

[chemical structure]

[0177] In some embodiments, the TNA is a 4′-modified TNA having the structure of:

[chemical structure]

wherein each R is independently an optionally substituted alkyl, B is an optionally modified nucleobase, and * represents the bond to the internucleotide linkage to the subsequent nucleotide. In some embodiments, at least one R is a linear or branched C₁-C₃ alkyl. In some embodiments, each R is independently a linear or branched C₁-C₃ alkyl. In one embodiment, each R is methyl.

[0178] In some embodiments, in the above 4′-modified TNA formulas, R is C₁-C₆ alkyl, optionally substituted with one or more substituents selected from the group consisting of alkenyl, alkynyl, aryl, heteroaryl, OR^{a}, halo, NR′R″, and CR′R″R′″, wherein R′, R″, and R′″ are each independently H, alkyl, halo, or COR^{a}, and R^{a} is H, alkyl, or alkoxyalkyl, and wherein each substituent is optionally substituted with one or more of C(O), N(H), halogen, alkyl, alkenyl, alkynyl, aryl, heteroaryl, a lipophilic moiety, a carbohydrate, and/or a vitamin.

[0179] In some embodiments, in the above 4′-modified TNA formulas, R is methyl, optionally substituted with one or more substituents selected from the group consisting of alkenyl, alkynyl, aryl, heteroaryl, OR^{a}, halo, NR′R″, and CR′R″R′″, wherein R′, R″, and R′″ are each independently H, alkyl, halo, or COR^{a}, and R^{a} is H, alkyl, or alkoxyalkyl, and wherein each substituent is optionally substituted with one or more of C(O), N(H), halogen, alkyl, alkenyl, alkynyl, aryl, heteroaryl, a lipophilic moiety, a carbohydrate, and/or a vitamin.

[0180] In some embodiments, in the above 4′-modified TNA formulas, R is methyl substituted with hydroxyl, alkoxy, or alkoxyalkoxy, and wherein R is in (R) or (S) configuration. In one embodiment, the 4′-modified TNA has the structure of

[chemical structure]

[0181] In some embodiments, in the above 4′-modified TNA formulas, R is C₁-C₃ alkyl substituted with one or more halogen groups, and wherein R is in (R) or (S) configuration. In one embodiment, the 4′-modified TNA has the structure of

[chemical structure]

[0182] In some embodiments, in the above 4′-modified TNA formulas, R is methyl substituted with an alkenyl or alkynyl, and wherein R is in (R) or (S) configuration. In one embodiment, the 4′-modified TNA has the structure of

[chemical structure]

[0183] In some embodiments, in the above 4′-modified TNA formulas, R is methyl substituted with a triazoryl group, wherein the triazoryl group has a N atom optionally substituted with one or more of C(O), N(H), alkyl, alkenyl, alkynyl, aryl, heteroaryl, a lipophilic moiety, a carbohydrate, and/or a vitamin, and wherein R is in (R) or (S) configuration. In one embodiment, the 4′-modified TNA has the structure of

[chemical structure]

wherein R₁ is one of the following:

[chemical structure]

[chemical structure]

[chemical structure]

[chemical structure]

[chemical structure]

[chemical structure]

[chemical structure]

[chemical structure]

[chemical structure]

[chemical structure]

and
[0184] n is 1-10.

[0185] In some embodiments, in the above 4′-modified TNA formulas, R is methyl substituted with an amino group, optionally substituted with one or more of C(O), N(H), halogen, alkyl, alkenyl, alkynyl, aryl, heteroaryl, a lipophilic moiety, a carbohydrate, and/or a vitamin, and wherein R is in (R) or (S) configuration. In one embodiment, the 4′-modified TNA has the structure of

[chemical structure]

wherein R₁ is one of the following:

[chemical structure]

[chemical structure]

[0186] In some embodiments, in all the above TNA formulas, B is a natural nucleobase, such as

[chemical structure]

[0187] In some embodiments, in all the above TNA formulas, B is a purine with modifications. Exemplary structures for B are:

[chemical structure]

[0188] In some embodiments, in all the above TNA formulas, B is a pyrimidine with modifications. Exemplary structures for B are:

[chemical structure]

[0189] In some embodiments, in all the above TNA formulas, B has a structure of

[chemical structure]

R^{b} may comprise a lipophilic moiety, a carbohydrate, a folate, or a glutamate urea (PUPA). For instance, R^{b} may be a lipophilic moiety containing a containing a saturated or unsaturated C₄-C₃₀ hydrocarbon chain, such as a saturated or unsaturated C₁₆ hydrocarbon chain.

[0190] In some embodiments, R^{b} is one of the following:

[chemical structure]

[chemical structure]

[chemical structure]

[0191] In some embodiments, R^{b} has a formula of

[chemical structure]

wherein s is 1-10, and Ln is one of the following:

[chemical structure]

### Lipophilic Moiety

[0192] The term “lipophile” or “lipophilic moiety” broadly refers to any compound or chemical moiety having an affinity for lipids. One way to characterize the lipophilicity of the lipophilic moiety is by the octanol-water partition coefficient, log K_{ow}, where K_{ow} is the ratio of a chemical's concentration in the octanol-phase to its concentration in the aqueous phase of a two-phase system at equilibrium. The octanol-water partition coefficient is a laboratory-measured property of a substance. However, it may also be predicted by using coefficients attributed to the structural components of a chemical which are calculated using first-principle or empirical methods (see, for example, Tetko et al., J. Chem. Inf Comput. Sci. 41:1407-21 (2001), which is incorporated herein by reference in its entirety). It provides a thermodynamic measure of the tendency of the substance to prefer a non-aqueous or oily milieu rather than water (i.e. its hydrophilic/lipophilic balance). In principle, a chemical substance is lipophilic in character when its log K_{ow} exceeds 0. Typically, the lipophilic moiety possesses a log K_{ow} exceeding 1, exceeding 1.5, exceeding 2, exceeding 3, exceeding 4, exceeding 5, or exceeding 10. For instance, the log K_{ow} of 6-amino hexanol, for instance, is predicted to be approximately 0.7. Using the same method, the log K_{ow} of cholesteryl N-(hexan-6-ol) carbamate is predicted to be 10.7.

[0193] The lipophilicity of a molecule can change with respect to the functional group it carries. For instance, adding a hydroxyl group or amine group to the end of a lipophilic moiety can increase or decrease the partition coefficient (e.g., log K_{ow}) value of the lipophilic moiety.

[0194] Alternatively, the hydrophobicity of the dsRNA agent, conjugated to one or more lipophilic moieties, can be measured by its protein binding characteristics. For instance, the unbound fraction in the plasma protein binding assay of the dsRNA agent can be determined to positively correlate to the relative hydrophobicity of the dsRNA agent, which can positively correlate to the silencing activity of the dsRNA agent.

[0195] In one embodiment, the plasma protein binding assay determined is an electrophoretic mobility shift assay (EMSA) using human serum albumin protein. An exemplary protocol of this binding assay is illustrated in detail in Example 14 of WO 2019/217459, which is incorporated herein by reference in its entirety. The hydrophobicity of the dsRNA agent, measured by fraction of unbound siRNA in the binding assay, exceeds 0.15, exceeds 0.2, exceeds 0.25, exceeds 0.3, exceeds 0.35, exceeds 0.4, exceeds 0.45, or exceeds 0.5 for an enhanced in vivo delivery of siRNA.

[0196] Accordingly, conjugating the lipophilic moieties to the dsRNA agent provides optimal hydrophobicity for the enhanced in vivo delivery of siRNA.

[0197] In certain embodiments, the lipophilic moiety is an aliphatic, cyclic such as alicyclic, or polycyclic such as polyalicyclic compound, such as a steroid (e.g., sterol) or a linear or branched aliphatic hydrocarbon. The lipophilic moiety may generally comprises a hydrocarbon chain, which may be cyclic or acyclic. The hydrocarbon chain may comprise various substituents and/or one or more heteroatoms, such as an oxygen or nitrogen atom. Such lipophilic aliphatic moieties include, without limitation, saturated or unsaturated C₄-C₃₀ hydrocarbon (e.g., C₄-C₁₈ hydrocarbon), saturated or unsaturated fatty acids, waxes (e.g., monohydric alcohol esters of fatty acids and fatty diamides), terpenes (e.g., C₁₀ terpenes, C₁₅ sesquiterpenes, C₂₀ diterpenes, C₃₀ triterpenes, and C₄₀ tetraterpenes), and other polyalicyclic hydrocarbons. For instance, the lipophilic moiety may contain a C₄-C₃₀ hydrocarbon chain (e.g., C₄-C₃₀ alkyl or alkenyl). In some embodiments, the lipophilic moiety contains a saturated or unsaturated C₄-C₁₈ hydrocarbon chain (e.g., a linear C₄-C₁₈ alkyl or alkenyl). In some embodiment the lipophilic moiety contains a saturated or unsaturated C₆-C₁₈ hydrocarbon chain (e.g., a linear C₆-C₁₈ alkyl or alkenyl). In one embodiment, the lipophilic moiety contains a saturated or unsaturated C₁₆ hydrocarbon chain (e.g., a linear C₁₆ alkyl or alkenyl).

[0198] The lipophilic moiety may be attached to the dsRNA agent by any method known in the art, including via a functional grouping already present in the lipophilic moiety or introduced into the iRNA agent, such as a hydroxy group (e.g., —CO—CH₂—OH). The functional groups already present in the lipophilic moiety or introduced into the dsRNA agent include, but are not limited to, hydroxyl, amine, carboxylic acid, sulfonate, phosphate, thiol, azide, and alkyne.

[0199] Conjugation of the dsRNA agent and the lipophilic moiety may occur, for example, through formation of an ether or a carboxylic or carbamoyl ester linkage between the hydroxy and an alkyl group R—, an alkanoyl group RCO— or a substituted carbamoyl group RNHCO—. The alkyl group R may be cyclic (e.g., cyclohexyl) or acyclic (e.g., straight-chained or branched; and saturated or unsaturated). Alkyl group R may be a butyl, pentyl, hexyl, heptyl, octyl, nonyl, decyl, undecyl, dodecyl, tridecyl, tetradecyl, pentadecyl, hexadecyl, heptadecyl or octadecyl group, or the like.

[0200] In some embodiments, the lipophilic moiety is conjugated to the dsRNA agent via a linker a linker containing an ether, thioether, urea, carbonate, amine, amide, maleimide-thioether, disulfide, phosphodiester, sulfonamide linkage, a product of a click reaction (e.g., a triazole from the azide-alkyne cycloaddition), or carbamate.

[0201] In some embodiments, the lipophilic moiety is a steroid, such as sterol. Steroids are polycyclic compounds containing a perhydro-1,2-cyclopentanophenanthrene ring system. Steroids include, without limitation, bile acids (e.g., cholic acid, deoxycholic acid and dehydrocholic acid), cortisone, digoxigenin, testosterone, cholesterol, and cationic steroids, such as cortisone. A “cholesterol derivative” refers to a compound derived from cholesterol, for example by substitution, addition or removal of substituents.

[0202] In some embodiments, the lipophilic moiety is an aromatic moiety. In this context, the term “aromatic” refers broadly to mono- and polyaromatic hydrocarbons. Aromatic groups include, without limitation, C₆-C₁₄ aryl moieties comprising one to three aromatic rings, which may be optionally substituted; “aralkyl” or “arylalkyl” groups comprising an aryl group covalently linked to an alkyl group, either of which may independently be optionally substituted or unsubstituted; and “heteroaryl” groups. As used herein, the term “heteroaryl” refers to groups having 5 to 14 ring atoms, preferably 5, 6, 9, or 10 ring atoms; having 6, 10, or 147L electrons shared in a cyclic array, and having, in addition to carbon atoms, between one and about three heteroatoms selected from the group consisting of nitrogen (N), oxygen (O), and sulfur (S).

[0203] As employed herein, a “substituted” alkyl, cycloalkyl, aryl, heteroaryl, or heterocyclic group is one having between one and about four, preferably between one and about three, more preferably one or two, non-hydrogen substituents. Suitable substituents include, without limitation, halo, hydroxy, nitro, haloalkyl, alkyl, alkaryl, aryl, aralkyl, alkoxy, aryloxy, amino, acylamino, alkylcarbamoyl, arylcarbamoyl, aminoalkyl, alkoxycarbonyl, carboxy, hydroxyalkyl, alkanesulfonyl, arenesulfonyl, alkanesulfonamido, arenesulfonamido, aralkylsulfonamido, alkylcarbonyl, acyloxy, cyano, and ureido groups.

[0204] In some embodiments, the lipophilic moiety is an aralkyl group, e.g., a 2-arylpropanoyl moiety. The structural features of the aralkyl group are selected so that the lipophilic moiety will bind to at least one protein in vivo. In certain embodiments, the structural features of the aralkyl group are selected so that the lipophilic moiety binds to serum, vascular, or cellular proteins. In certain embodiments, the structural features of the aralkyl group promote binding to albumin, an immunoglobulin, a lipoprotein, α-2-macroglubulin, or α-1-glycoprotein.

[0205] In certain embodiments, the ligand is naproxen or a structural derivative of naproxen. Procedures for the synthesis of naproxen can be found in U.S. Pat. Nos. 3,904,682 and 4,009,197, which are hereby incorporated by reference in their entirety. Naproxen has the chemical name (S)-6-Methoxy-α-methyl-2-naphthaleneacetic acid and the structure is

[chemical structure]

[0206] In certain embodiments, the ligand is ibuprofen or a structural derivative of ibuprofen. Procedures for the synthesis of ibuprofen can be found in U.S. Pat. No. 3,228,831, which are hereby incorporated by reference in their entirety. The structure of ibuprofen is

[chemical structure]

[0207] Additional exemplary aralkyl groups are illustrated in U.S. Pat. No. 7,626,014, which is incorporated herein by reference in its entirety.

[0208] In another embodiment, suitable lipophilic moieties include lipid, cholesterol, retinoic acid, cholic acid, adamantane acetic acid, 1-pyrene butyric acid, dihydrotestosterone, 1,3-bis-O(hexadecyl)glycerol, geranyloxyhexyanol, hexadecylglycerol, borneol, menthol, 1,3-propanediol, heptadecyl group, palmitic acid, myristic acid, O3-(oleoyl)lithocholic acid, O3-(oleoyl)cholenic acid, ibuprofen, naproxen, dimethoxytrityl, or phenoxazine.

[0209] In some embodiments, the lipophilic moiety is a C₆-C₃₀ acid (e.g., hexanoic acid, heptanoic acid, octanoic acid, nonanoic acid, decanoic acid, undecanoic acid, dodcanoic acid, tridecanoic acid, tetradecanoic acid, pentadecanoic acid, hexadecanoic acid, heptadecanoic acid, octadecanoic acid, oleic acid, linoleic acid, arachidonic acid, cis-4,7,10,13,16,19-docosahexanoic acid, vitamin A, vitamin E, cholesterol etc.) or a C₆-C₃₀ alcohol (e.g., hexanol, heptanol, octanol, nonanol, decanol, undecanol, dodcanol, tridecanol, tetradecanol, pentadecanol, hexadecanol, heptadecanol, octadecanol, oleyl alcohol, linoleyl alcohol, arachidonic alcohol, cis-4,7,10,13,16,19-docosahexanol, retinol, vitamin E, cholesterol etc.).

[0210] In some embodiments, the lipophilic moiety (or lipophilic monomer including the lipophilic moiety and a carrier and/or linker that conjugates the lipophilic moiety to the dsRNA agent) is selected from the group consisting of:

[chemical structure]

[chemical structure]

[chemical structure]

[chemical structure]

[chemical structure]

[chemical structure]

[0211] wherein:
   [0212] m is an integer of 0-8;
   [0213] n is an integer of 1-21;
   [0214] R₂′ is H, OH, F, OMe, O-methoxyalkyl, O-allyl, O—N-methylacetamido, O-dimethylaminoethoxyethyl, or O-aminopropyl;
   [0215] B is a modified or unmodified nucleobase;
   [0216] W is an alkyl; and
   [0217] R and R′ are each independently H or alkyl.

[0218] In the above structures for the lipophilic moieties or lipophilic monomers, there may also contain one or more asymmetric centers and thus occur as racemates and racemic mixtures, single enantiomers, individual diastereomers and diastereomeric mixtures. All such isomeric forms are expressly included.

[0219] In the above structures for the lipophilic moieties or lipophilic monomers, the alkylene chain can contain one or more unsaturated bonds.

[0220] Integer m is 0-8. Integer n is 1-21. R₂′ may be any functional group that is an acceptable 2′-modification for a ribose sugar, such as a 2′-O-methoxyalkyl (e.g., 2′-O-methoxymethyl, 2′-O-methoxyethyl, or 2′-O-2-methoxypropanyl) modification, 2′-O-allyl modification, 2′-C-allyl modification, 2′-fluoro modification, 2′-O—N-methylacetamido (2′-O-NMA) modification, 2′-O-dimethylaminoethoxyethyl (2′-O-DMAEOE) modification, 2′-O-aminopropyl (2′-O-AP) modification, or 2′-ara-F modification. For instance, R₂′ may be H, OH, F, OMe, O-methoxyalkyl, O-allyl, O—N-methylacetamido, O-dimethylaminoethoxyethyl, or O-aminopropyl. B is a modified or unmodified nucleobase. W is an alkyl group such as a C₁-C₄ alkyl (e.g., methyl, ethyl, propyl, isopropyl, butyl, isobutyl, t-butyl). R, R′, and R″ are each independently H or an alkyl group such as a C₁-C₄ alkyl (e.g., methyl, ethyl, propyl, isopropyl, t-butyl).

[0221] In some embodiments, the lipophilic moiety (or lipophilic monomer including the lipophilic moiety and a carrier and/or linker that conjugates the lipophilic moiety to the dsRNA agent) conjugated to one or more positions of a strand of the compound has a structure of:

[chemical structure]

### (R₂′ is 2′-F, 2′-OMe,

2′-NMA, 2′-deoxy, or 2′-OH);

[chemical structure]

[chemical structure]

[chemical structure]

[chemical structure]

[chemical structure]

In these structures, B is a modified or unmodified nucleobase.

[0222] Specific embodiments of the lipophilic moiety (or lipophilic monomer including the lipophilic moiety and a carrier and/or linker that conjugates the lipophilic moiety to the dsRNA agent) include:

[chemical structure]

[chemical structure]

[chemical structure]

[chemical structure]

[chemical structure]

In these structures, B is a modified or unmodified nucleobase; and R and R′ are each independently H, methyl, ethyl, isopropyl, or t-butyl.

[0223] In some embodiments, the lipophilic moiety conjugated to a strand of the compound (a single strand of a single-stranded oligonucleotide; or sense strand and/or antisense strand of a double-stranded oligonucleotide) via a carrier of:

[chemical structure]

[chemical structure]

[chemical structure]

In these embodiments, R is the lipophilic moiety as defined herein. R₂′ is H, OH, F, OMe, O-methoxyalkyl, O-allyl, O—N-methylacetamido, O-dimethylaminoethoxyethyl, or O-aminopropyl. B is a modified or unmodified nucleobase.

[0224] In some embodiments, the lipophilic moiety conjugated to an internal position of a strand of the compound (a single strand of a single-stranded oligonucleotide; or sense strand and/or antisense strand of a double-stranded oligonucleotide) via a carrier of:

[chemical structure]

In these embodiments, R is the lipophilic moiety as defined herein. n is an integer of 1-21. R₂′ is H, OH, F, OMe, O-methoxyalkyl, O-allyl, O—N-methylacetamido, O-dimethylaminoethoxyethyl, or O-aminopropyl. B is a modified or unmodified nucleobase.

[0225] Additional examples of the lipophilic monomers can be found in the Examples of WO 2021/092371, which is incorporated herein by reference in its entirety.

[0226] In certain embodiments, more than one lipophilic moieties can be incorporated into the dsRNA agent, particularly when the lipophilic moiety has a low lipophilicity or hydrophobicity. In one embodiment, two or more lipophilic moieties are incorporated into the same strand of the double-strand iRNA agent. In one embodiment, each strand of the dsRNA agent has one or more lipophilic moieties incorporated. In one embodiment, two or more lipophilic moieties are incorporated into the same position (i.e., the same nucleobase, same sugar moiety, or same internucleosidic linkage) of the dsRNA agent. This can be achieved by, e.g., conjugating the two or more lipophilic moieties via a carrier, and/or conjugating the two or more lipophilic moieties via a branched linker, and/or conjugating the two or more lipophilic moieties via one or more linkers, with one or more linkers linking the lipophilic moieties consecutively.

[0227] In some embodiments, the lipophilic moiety may be conjugated to any part of the dsRNA agent, e.g., a nucleobase, sugar moiety, or internucleosidic linkage. The lipophilic moiety may be conjugated to the dsRNA agent via a direct attachment to the nucleobase, ribosugar, or internucleosidic linkage of the dsRNA agent. Alternatively, the lipophilic moiety may be conjugated to the dsRNA agent via a linker or a carrier.

[0228] In certain embodiments, the lipophilic moiety may be conjugated to the dsRNA agent via one or more linkers (tethers).

[0229] In one embodiment, the lipophilic moiety is conjugated to the dsRNA agent via a linker containing an ether, thioether, urea, carbonate, amine, amide, maleimide-thioether, disulfide, phosphodiester, sulfonamide linkage, a product of a click reaction (e.g., a triazole from the azide-alkyne cycloaddition), or carbamate.

### Linkers Tethers

[0230] Linkers/Tethers are connected to the lipophilic moiety at a “tethering attachment point (TAP).” Linkers/Tethers may include any C₁-C₁₀₀ carbon-containing moiety, (e.g. C₁-C₇₅, C₁-C₅₀, C₁-C₂₀, C₁-C₁₀; C₁, C₂, C₃, C₄, C₅, C₆, C₇, C₈, C₉, or C₁₀), and may have at least one nitrogen atom. In certain embodiments, the nitrogen atom forms part of a terminal amino or amido (NHC(O)—) group on the linker/tether, which may serve as a connection point for the lipophilic moiety. Non-limited examples of linkers/tethers (underlined) include TAP—(CH₂)ₙNH—; TAP—C(O)(CH₂)ₙNH—; TAP—NR″″(CH₂)ₙNH—, TAP—C(O)—(CH₂)ₙ—C(O)—; TAP—C(O)—(CH₂)ₙ—C(O)O—; TAP—C(O)—O—; TAP—C(O)—(CH₂)ₙ—NH—C(O)—; TAP—C(O)—(CH₂)ₙ—; TAP—C(O)—NH—; TAP—C(O)—; TAP—(CH₂)ₙ—C(O)—; TAP—(CH₂)ₙ—C(O)O—; TAP—(CH₂)ₙ—; or TAP—(CH₂)ₙ—NH—C(O)—; in which n is 1-20 (e.g., 1, 2, 3, 4, 5, 6, 7, 8, 9, 10, 11, 12, 13, 14, 15, 16, 17, 18, 19, or 20) and R″″ is C₁-C₆ alkyl. Preferably, n is 5, 6, or 11. In other embodiments, the nitrogen may form part of a terminal oxyamino group, e.g., —ONH₂, or hydrazino group, —NHNH₂. The linker/tether may optionally be substituted, e.g., with hydroxy, alkoxy, perhaloalkyl, and/or optionally inserted with one or more additional heteroatoms, e.g., N, O, or S. Preferred tethered ligands may include, e.g., TAP—(CH₂)ₙNH(LIGAND); TAP—C(O)(CH₂)ₙNH(LIGAND); TAP—NR″″(CH₂)ₙNH(LIGAND); TAP—(CH₂)ₙONH(LIGAND); TAP—C(O)(CH₂)ₙONH(LIGAND); TAP—NR″″(CH₂)ₙONH(LIGAND); TAP—(CH₂)ₙNHNH₂(LIGAND), TAP—C(O)(CH₂)ₙNHNH₂(LIGAND); TAP—NR″″(CH₂)ₙNHNH₂(LIGAND); TAP—C(O)—(CH₂)ₙ—C(O)(LIGAND); TAP—C(O)—(CH₂)ₙ—C(O)O(LIGAND); TAP—C(O)—O(LIGAND); TAP—C(O)—(CH₂)ₙ—NH—C(O)(LIGAND); TAP—C(O)—(CH₂)ₙ(LIGAND); TAP—C(O)—NH(LIGAND); TAP—C(O)(LIGAND); TAP—(CH₂)ₙ—C(O)(LIGAND); TAP—(CH₂)ₙ—C(O)O(LIGAND); TAP—(CH₂)ₙ(LIGAND); or TAP—(CH₂)ₙ—NH—C(O)(LIGAND). In some embodiments, amino terminated linkers/tethers (e.g., NH₂, ONH₂, NH₂NH₂) can form an imino bond (i.e., C═N) with the ligand. In some embodiments, amino terminated linkers/tethers (e.g., NH₂, ONH₂, NH₂NH₂) can acylated, e.g., with C(O)CF₃.

[0231] In some embodiments, the linker/tether can terminate with a mercapto group (i.e., SH) or an olefin (e.g., CH═CH₂). For example, the tether can be TAP—(CH₂)ₙ—SH, TAP—C(O)(CH₂)ₙSH, TAP—(CH₂)ₙ—(CH═CH₂), or TAP—C(O)(CH₂)ₙ(CH═CH₂), in which n can be as described elsewhere. The tether may optionally be substituted, e.g., with hydroxy, alkoxy, perhaloalkyl, and/or optionally inserted with one or more additional heteroatoms, e.g., N, O, or S. The double bond can be cis or trans or E or Z.

[0232] In other embodiments, the linker/tether may include an electrophilic moiety, preferably at the terminal position of the linker/tether. Exemplary electrophilic moieties include, e.g., an aldehyde, alkyl halide, mesylate, tosylate, nosylate, or brosylate, or an activated carboxylic acid ester, e.g. an NHS ester, or a pentafluorophenyl ester. Preferred linkers/tethers (underlined) include TAP—(CH₂)ₙCHO; TAP—C(O)(CH₂)ₙCHO; or TAP—NR″″(CH₂)ₙCHO, in which n is 1-6 and R″″ is C₁-C₆ alkyl; or TAP—(CH₂)ₙC(O)ONHS; TAP—C(O)(CH₂)ₙC(O)ONHS; or TAP—NR″″(CH₂)ₙC(O)ONHS, in which n is 1-6 and R″″ is C₁-C₆ alkyl; TAP—(CH₂)ₙC(O)OC₆F₅; TAP—C(O)(CH₂)ₙC(O)OC₆F₅; or TAP—NR″″(CH₂)ₙC(O)OC₆F₅, in which n is 1-11 and R″″ is C₁-C₆ alkyl; or —(CH₂)ₙCH₂LG; TAP—C(O)(CH₂)ₙCH₂LG; or TAP—NR″″(CH₂)ₙCH₂LG, in which n can be as described elsewhere and R″″ is C₁-C₆ alkyl (LG can be a leaving group, e.g., halide, mesylate, tosylate, nosylate, brosylate). Tethering can be carried out by coupling a nucleophilic group of a ligand, e.g., a thiol or amino group with an electrophilic group on the tether.

[0233] In other embodiments, it can be desirable for the monomer to include a phthalimido group (K) at the terminal position of the linker/tether.

[chemical structure]

[0234] In other embodiments, other protected amino groups can be at the terminal position of the linker/tether, e.g., alloc, monomethoxy trityl (MMT), trifluoroacetyl, Fmoc, or aryl sulfonyl (e.g., the aryl portion can be ortho-nitrophenyl or ortho, para-dinitrophenyl).

[0235] Any of the linkers/tethers described herein may further include one or more additional linking groups, e.g., —O—(CH₂)ₙ—, —(CH₂)ₙ—SS—, —(CH₂)ₙ—, or —(CH═CH)—.

### Cleavable Linkers Tethers

[0236] In some embodiments, at least one of the linkers/tethers can be a redox cleavable linker, an acid cleavable linker, an esterase cleavable linker, a phosphatase cleavable linker, or a peptidase cleavable linker.

[0237] In one embodiment, at least one of the linkers/tethers can be a reductively cleavable linker (e.g., a disulfide group).

[0238] In one embodiment, at least one of the linkers/tethers can be an acid cleavable linker (e.g., a hydrazone group, an ester group, an acetal group, or a ketal group).

[0239] In one embodiment, at least one of the linkers/tethers can be an esterase cleavable linker (e.g., an ester group).

[0240] In one embodiment, at least one of the linkers/tethers can be a phosphatase cleavable linker (e.g., a phosphate group).

[0241] In one embodiment, at least one of the linkers/tethers can be a peptidase cleavable linker (e.g., a peptide bond).

[0242] Cleavable linking groups are susceptible to cleavage agents, e.g., pH, redox potential or the presence of degradative molecules. Generally, cleavage agents are more prevalent or found at higher levels or activities inside cells than in serum or blood. Examples of such degradative agents include: redox agents which are selected for particular substrates or which have no substrate specificity, including, e.g., oxidative or reductive enzymes or reductive agents such as mercaptans, present in cells, that can degrade a redox cleavable linking group by reduction; esterases; endosomes or agents that can create an acidic environment, e.g., those that result in a pH of five or lower; enzymes that can hydrolyze or degrade an acid cleavable linking group by acting as a general acid, peptidases (which can be substrate specific), and phosphatases.

[0243] A cleavable linkage group, such as a disulfide bond can be susceptible to pH. The pH of human serum is 7.4, while the average intracellular pH is slightly lower, ranging from about 7.1-7.3. Endosomes have a more acidic pH, in the range of 5.5-6.0, and lysosomes have an even more acidic pH at around 5.0. Some tethers will have a linkage group that is cleaved at a preferred pH, thereby releasing the dsRNA agent from a ligand (e.g., a targeting or cell-permeable ligand, such as cholesterol) inside the cell, or into the desired compartment of the cell.

[0244] A chemical junction (e.g., a linking group) that links a ligand to a dsRNA agent can include a disulfide bond. When the iRNA agent/ligand complex is taken up into the cell by endocytosis, the acidic environment of the endosome will cause the disulfide bond to be cleaved, thereby releasing the dsRNA agent from the ligand (Quintana et al., Pharm Res. 19:1310-1316, 2002; Patri et al., Curr. Opin. Curr. Biol. 6:466-471, 2002). The ligand can be a targeting ligand or a second therapeutic agent that may complement the therapeutic effects of the iRNA agent.

[0245] A tether can include a linking group that is cleavable by a particular enzyme. The type of linking group incorporated into a tether can depend on the cell to be targeted by the iRNA agent. For example, a dsRNA agent that targets an mRNA in liver cells can be conjugated to a tether that includes an ester group. Liver cells are rich in esterases, and therefore the tether will be cleaved more efficiently in liver cells than in cell types that are not esterase-rich. Cleavage of the tether releases the dsRNA agent from a ligand that is attached to the distal end of the tether, thereby potentially enhancing silencing activity of the iRNA agent. Other cell-types rich in esterases include cells of the lung, renal cortex, and testis.

[0246] Tethers that contain peptide bonds can be conjugated to iRNA agents target to cell types rich in peptidases, such as liver cells and synoviocytes. For example, a dsRNA agent targeted to synoviocytes, such as for the treatment of an inflammatory disease (e.g., rheumatoid arthritis), can be conjugated to a tether containing a peptide bond.

[0247] In general, the suitability of a candidate cleavable linking group can be evaluated by testing the ability of a degradative agent (or condition) to cleave the candidate linking group. It will also be desirable to also test the candidate cleavable linking group for the ability to resist cleavage in the blood or when in contact with other non-target tissue, e.g., tissue the dsRNA agent would be exposed to when administered to a subject. Thus one can determine the relative susceptibility to cleavage between a first and a second condition, where the first is selected to be indicative of cleavage in a target cell and the second is selected to be indicative of cleavage in other tissues or biological fluids, e.g., blood or serum. The evaluations can be carried out in cell free systems, in cells, in cell culture, in organ or tissue culture, or in whole animals. It may be useful to make initial evaluations in cell-free or culture conditions and to confirm by further evaluations in whole animals. In preferred embodiments, useful candidate compounds are cleaved at least 2, 4, 10 or 100 times faster in the cell (or under in vitro conditions selected to mimic intracellular conditions) as compared to blood or serum (or under in vitro conditions selected to mimic extracellular conditions).

### Redox Cleavable Linking Groups

[0248] One class of cleavable linking groups are redox cleavable linking groups that are cleaved upon reduction or oxidation. An example of reductively cleavable linking group is a disulphide linking group (—S—S—). To determine if a candidate cleavable linking group is a suitable “reductively cleavable linking group,” or for example is suitable for use with a particular iRNA moiety and particular targeting agent one can look to methods described herein. For example, a candidate can be evaluated by incubation with dithiothreitol (DTT), or other reducing agent using reagents know in the art, which mimic the rate of cleavage which would be observed in a cell, e.g., a target cell. The candidates can also be evaluated under conditions which are selected to mimic blood or serum conditions. In a preferred embodiment, candidate compounds are cleaved by at most 10% in the blood. In preferred embodiments, useful candidate compounds are degraded at least 2, 4, 10 or 100 times faster in the cell (or under in vitro conditions selected to mimic intracellular conditions) as compared to blood (or under in vitro conditions selected to mimic extracellular conditions). The rate of cleavage of candidate compounds can be determined using standard enzyme kinetics assays under conditions chosen to mimic intracellular media and compared to conditions chosen to mimic extracellular media.

### Phosphate-Based Cleavable Linking Groups

[0249] Phosphate-based linking groups are cleaved by agents that degrade or hydrolyze the phosphate group. An example of an agent that cleaves phosphate groups in cells are enzymes such as phosphatases in cells. Examples of phosphate-based linking groups are O—P(O)(ORk)-O—, —O—P(S)(ORk)-O—, —O—P(S)(SRk)-O—, —S—P(O)(ORk)-O—, —O—P(O)(ORk)-S—, —S—P(O)(ORk)-S—, —O—P(S)(ORk)-S—, S—P(S)(ORk)-O—, —O—P(O)(Rk)-O—, —O—P(S)(Rk)-O—, —S—P(O)(Rk)-O—, —S—P(S)(Rk)-O—, —S—P(O)(Rk)-S—, —O—P(S)(Rk)-S—. Preferred embodiments are —O—P(O)(OH)—O—, —O—P(S)(OH)O—-, —O—P(S)(SH)O—, —S—P(O)(OH)O—, —O—P(O)(OH)—S—, —S—P(O)(OH)S—, —O—P(S)(OH)S—, —S—P(S)(OH)O—, —O—P(O)(H)O—, —O—P(S)(H)O—, —S—P(O)(H)O—, —S—P(S)(H)O—, —S—P(O)(H)—S—, —O—P(S)(H)—S—. A preferred embodiment is —O—P(O)(OH)—O—.

[0250] These candidates can be evaluated using methods analogous to those described above.

### Acid Cleavable Linking Groups

[0251] Acid cleavable linking groups are linking groups that are cleaved under acidic conditions. In preferred embodiments acid cleavable linking groups are cleaved in an acidic environment with a pH of about 6.5 or lower (e.g., about 6.0, 5.5, 5.0, or lower), or by agents such as enzymes that can act as a general acid. In a cell, specific low pH organelles, such as endosomes and lysosomes can provide a cleaving environment for acid cleavable linking groups. Examples of acid cleavable linking groups include but are not limited to hydrazones, ketals, acetals, esters, and esters of amino acids. Acid cleavable groups can have the general formula —C═NN—, C(O)O, or —OC(O). A preferred embodiment is when the carbon attached to the oxygen of the ester (the alkoxy group) is an aryl group, substituted alkyl group, or tertiary alkyl group such as dimethyl pentyl or t-butyl. These candidates can be evaluated using methods analogous to those described above.

### Ester-Based Linking Groups

[0252] Ester-based linking groups are cleaved by enzymes such as esterases and amidases in cells. Examples of ester-based cleavable linking groups include but are not limited to esters of alkylene, alkenylene and alkynylene groups. Ester cleavable linking groups have the general formula —C(O)O—, or —OC(O)—. These candidates can be evaluated using methods analogous to those described above.

### Peptide-Based Cleaving Groups

[0253] Peptide-based linking groups are cleaved by enzymes such as peptidases and proteases in cells. Peptide-based cleavable linking groups are peptide bonds formed between amino acids to yield oligopeptides (e.g., dipeptides, tripeptides etc.) and polypeptides. Peptide-based cleavable groups do not include the amide group (—C(O)NH—). The amide group can be formed between any alkylene, alkenylene or alkynelene. A peptide bond is a special type of amide bond formed between amino acids to yield peptides and proteins. The peptide based cleavage group is generally limited to the peptide bond (i.e., the amide bond) formed between amino acids yielding peptides and proteins and does not include the entire amide functional group. Peptide cleavable linking groups have the general formula —NHCHR¹C(O)NHCHR²C(O)—, where R¹ and R² are the R groups of the two adjacent amino acids. These candidates can be evaluated using methods analogous to those described above.

### Biocleavable Linkers/Tethers

[0254] The linkers can also includes biocleavable linkers that are nucleotide and non-nucleotide linkers or combinations thereof that connect two parts of a molecule, for example, one or both strands of two individual siRNA molecule to generate a bis(siRNA). In some embodiments, mere electrostatic or stacking interaction between two individual siRNAs can represent a linker. The non-nucleotide linkers include tethers or linkers derived from monosaccharides, disaccharides, oligosaccharides, and derivatives thereof, aliphatic, alicyclic, heterocyclic, and combinations thereof.

[0255] In some embodiments, at least one of the linkers (tethers) is a bio-cleavable linker selected from the group consisting of DNA, RNA, disulfide, amide, functionalized monosaccharides or oligosaccharides of galactosamine, glucosamine, glucose, galactose, and mannose, and combinations thereof.

[0256] In one embodiment, the bio-cleavable carbohydrate linker may have 1 to 10 saccharide units, which have at least one anomeric linkage capable of connecting two siRNA units. When two or more saccharides are present, these units can be linked via 1-3, 1-4, or 1-6 sugar linkages, or via alkyl chains.

[0257] Exemplary bio-cleavable linkers include, without limitation, the following endosomal cleavable linkers as well as phosphoramidites.

[chemical structure]

[chemical structure]

[chemical structure]

[chemical structure]

[chemical structure]

[chemical structure]

[chemical structure]

[chemical structure]

[chemical structure]

[chemical structure]

[chemical structure]

[chemical structure]

[chemical structure]

[chemical structure]

[chemical structure]

[chemical structure]

[chemical structure]

[chemical structure]

[chemical structure]

[chemical structure]

[chemical structure]

[chemical structure]

[chemical structure]

[0258] More discussion about the biocleavable linkers may be found in PCT application No. PCT/US18/14213, entitled “Endosomal Cleavable Linkers,” filed on Jan. 18, 2018, the content of which is incorporated herein by reference in its entirety.

### Carriers

[0259] In certain embodiments, the lipophilic moiety is conjugated to the dsRNA agent via a carrier that replaces one or more nucleotide(s).

[0260] The carrier can be a cyclic group or an acyclic group. In one embodiment, the cyclic group is selected from the group consisting of pyrrolidinyl, pyrazolinyl, pyrazolidinyl, imidazolinyl, imidazolidinyl, piperidinyl, piperazinyl, [1,3]dioxolane, oxazolidinyl, isoxazolidinyl, morpholinyl, thiazolidinyl, isothiazolidinyl, quinoxalinyl, pyridazinonyl, tetrahydrofuryl, and decalin. In one embodiment, the acyclic group is a moiety based on a serinol backbone or a diethanolamine backbone.

[0261] In some embodiments, the carrier replaces one or more nucleotide(s) in the internal position(s) of the dsRNA agent.

[0262] In other embodiments, the carrier replaces the nucleotides at the terminal end of the sense strand or antisense strand. In one embodiment, the carrier replaces the terminal nucleotide on the 3′ end of the sense strand, thereby functioning as an end cap protecting the 3′ end of the sense strand. In one embodiment, the carrier is a cyclic group having an amine, for instance, the carrier may be pyrrolidinyl, pyrazolinyl, pyrazolidinyl, imidazolinyl, imidazolidinyl, piperidinyl, piperazinyl, [1,3]dioxolanyl, oxazolidinyl, isoxazolidinyl, morpholinyl, thiazolidinyl, isothiazolidinyl, quinoxalinyl, pyridazinonyl, tetrahydrofuranyl, or decalinyl.

[0263] A ribonucleotide subunit in which the ribose sugar of the subunit has been so replaced is referred to herein as a ribose replacement modification subunit (RRMS). The carrier can be a cyclic or acyclic moiety and include two “backbone attachment points” (e.g., hydroxyl groups) and a ligand (e.g., the lipophilic moiety). The lipophilic moiety can be directly attached to the carrier or indirectly attached to the carrier by an intervening linker/tether, as described above.

[chemical structure]

[0264] The ligand-conjugated monomer subunit may be the 5′ or 3′ terminal subunit of the iRNA molecule, i.e., one of the two “W” groups may be a hydroxyl group, and the other “W” group may be a chain of two or more unmodified or modified ribonucleotides. Alternatively, the ligand-conjugated monomer subunit may occupy an internal position, and both “W” groups may be one or more unmodified or modified ribonucleotides. More than one ligand-conjugated monomer subunit may be present in an iRNA agent.

### Sugar Replacement-Based Monomers, e.g., Ligand-Conjugated Monomers (Cyclic)

[0265] Cyclic sugar replacement-based monomers, e.g., sugar replacement-based ligand-conjugated monomers, are also referred to herein as RRMS monomer compounds. The carriers may have the general formula (LCM-2) provided below (In that structure preferred backbone attachment points can be chosen from R¹ or R²; R³ or R⁴; or R⁹ and R¹⁰ if Y is CR⁹R¹⁰ (two positions are chosen to give two backbone attachment points, e.g., R¹ and R⁴, or R⁴ and R⁹)). Preferred tethering attachment points include R⁷; R⁵ or R⁶ when X is CH₂. The carriers are described below as an entity, which can be incorporated into a strand. Thus, it is understood that the structures also encompass the situations wherein one (in the case of a terminal position) or two (in the case of an internal position) of the attachment points, e.g., R¹ or R²; R³ or R⁴; or R⁹ or R¹⁰ (when Y is CR⁹R¹⁰), is connected to the phosphate, or modified phosphate, e.g., sulfur containing, backbone. E.g., one of the above-named R groups can be —CH₂—, wherein one bond is connected to the carrier and one to a backbone atom, e.g., a linking oxygen or a central phosphorus atom.

[chemical structure]

[0266] wherein:
[0267] X is N(CO)R⁷, NR⁷ or CH₂;
[0268] Y is NR⁸, O, S, CR⁹R¹⁰;
[0269] Z is CR¹¹R¹² or absent;
[0270] Each of R¹, R², R³, R⁴, R⁹, and R¹⁰ is, independently, H, OR^{a}, or (CH₂)ₙOR^{b}, provided that at least two of R¹, R², R³, R⁴, R⁹, and R¹⁰ are OR^{a} and/or (CH₂)ₙOR^{b};
[0271] Each of R⁵, R⁶, R¹¹, and R¹² is, independently, a ligand, H, C₁-C₆ alkyl optionally substituted with 1-3 R¹³, or C(O)NHR⁷; or R⁵ and R¹¹ together are C₃-C₈ cycloalkyl optionally substituted with R¹⁴;
[0272] R⁷ can be a ligand, e.g., R⁷ can be R^{d}, or R⁷ can be a ligand tethered indirectly to the carrier, e.g., through a tethering moiety, e.g., C₁-C₂₀ alkyl substituted with NR^{c}R^{d}; or C₁-C₂₀ alkyl substituted with NHC(O)R^{d};
[0273] R⁸ is H or C₁-C₆ alkyl;
[0274] R¹³ is hydroxy, C₁-C₄ alkoxy, or halo;
[0275] R¹⁴ is NR^{c}R⁷;
[0276] R¹⁵ is C₁-C₆ alkyl optionally substituted with cyano, or C₂-C₆ alkenyl;
[0277] R¹⁶ is C₁-C₁₀ alkyl;
[0278] R¹⁷ is a liquid or solid phase support reagent;
[0279] L is —C(O)(CH₂)_{q}C(O)—, or —C(O)(CH₂)_{q}S—;
[0280] R^{a} is a protecting group, e.g., CAr₃; (e.g., a dimethoxytrityl group) or
[0281] Si(X^{5′})(X^{5″})(X^{5′″}) in which (X^{5′}), (X^{5″}), and (X^{5′″}) are as described elsewhere.
[0282] R^{b} is P(O)(O⁻)H, P(OR¹⁵)N(R¹⁶)₂ or L-R¹⁷;
[0283] R^{c} is H or C₁-C₆ alkyl;
[0284] R^{d} is H or a ligand;
[0285] Each Ar is, independently, C₆-C₁₀ aryl optionally substituted with C₁-C₄ alkoxy;
[0286] n is 1-4; and q is 0-4.

[0287] Exemplary carriers include those in which, e.g., X is N(CO)R⁷ or NR⁷, Y is CR⁹R¹⁰, and Z is absent; or X is N(CO)R⁷ or NR⁷, Y is CR⁹R¹⁰, and Z is CR¹¹R¹²; or X is N(CO)R⁷ or NR⁷, Y is NR⁸, and Z is CR¹¹R¹²; or X is N(CO)R⁷ or NR⁷, Y is O, and Z is CR¹¹R¹²; or X is CH₂; Y is CR⁹R¹⁰; Z is CR¹¹R¹², and R⁵ and R¹¹ together form C₆ cycloalkyl (H, z=2), or the indane ring system, e.g., X is CH₂; Y is CR⁹R¹⁰; Z is CR¹¹R¹², and R⁵ and R¹¹ together form C₅ cycloalkyl (H, z=1).

[0288] In certain embodiments, the carrier may be based on the pyrroline ring system or the 4-hydroxyproline ring system, e.g., X is N(CO)R⁷ or NR⁷, Y is CR⁹R¹⁰, and Z is absent (D).

[chemical structure]

OFG¹ is preferably attached to a primary carbon, e.g., an exocyclic alkylene group, e.g., a methylene group, connected to one of the carbons in the five-membered ring (—CH₂OFG¹ in D). OFG² is preferably attached directly to one of the carbons in the five-membered ring (—OFG² in D). For the pyrroline-based carriers, —CH₂OFG¹ may be attached to C-2 and OFG² may be attached to C-3; or —CH₂OFG¹ may be attached to C-3 and OFG² may be attached to C-4. In certain embodiments, CH₂OFG¹ and OFG² may be geminally substituted to one of the above-referenced carbons. For the 3-hydroxyproline-based carriers, —CH₂OFG¹ may be attached to C-2 and OFG² may be attached to C-4. The pyrroline- and 4-hydroxyproline-based monomers may therefore contain linkages (e.g., carbon-carbon bonds) wherein bond rotation is restricted about that particular linkage, e.g. restriction resulting from the presence of a ring. Thus, CH₂OFG¹ and OFG² may be cis or trans with respect to one another in any of the pairings delineated above Accordingly, all cis/trans isomers are expressly included. The monomers may also contain one or more asymmetric centers and thus occur as racemates and racemic mixtures, single enantiomers, individual diastereomers and diastereomeric mixtures. All such isomeric forms of the monomers are expressly included (e.g., the centers bearing CH₂OFG¹ and OFG² can both have the R configuration; or both have the S configuration; or one center can have the R configuration and the other center can have the S configuration and vice versa). The tethering attachment point is preferably nitrogen. Preferred examples of carrier D include the following:

[chemical structure]

[0289] In certain embodiments, the carrier may be based on the piperidine ring system (E), e.g., X is N(CO)R⁷ or NR⁷, Y is CR⁹R¹⁰, and Z is CR¹¹R¹².

[chemical structure]

OFG¹ is preferably attached to a primary carbon, e.g., an exocyclic alkylene group, e.g., a methylene group (n=1) or ethylene group (n=2), connected to one of the carbons in the six-membered ring [—(CH₂)ₙOFG¹ in E]. OFG² is preferably attached directly to one of the carbons in the six-membered ring (—OFG² in E). —(CH₂)ₙOFG¹ and OFG² may be disposed in a geminal manner on the ring, i.e., both groups may be attached to the same carbon, e.g., at C-2, C-3, or C-4. Alternatively, —(CH₂)ₙOFG¹ and OFG² may be disposed in a vicinal manner on the ring, i.e., both groups may be attached to adjacent ring carbon atoms, e.g., —(CH₂)ₙOFG¹ may be attached to C-2 and OFG² may be attached to C-3; —(CH₂)ₙOFG¹ may be attached to C-3 and OFG² may be attached to C-2; —(CH₂)ₙOFG¹ may be attached to C-3 and OFG² may be attached to C-4; or —(CH₂)ₙOFG¹ may be attached to C-4 and OFG² may be attached to C-3. The piperidine-based monomers may therefore contain linkages (e.g., carbon-carbon bonds) wherein bond rotation is restricted about that particular linkage, e.g. restriction resulting from the presence of a ring. Thus, —(CH₂)ₙOFG¹ and OFG² may be cis or trans with respect to one another in any of the pairings delineated above. Accordingly, all cis/trans isomers are expressly included. The monomers may also contain one or more asymmetric centers and thus occur as racemates and racemic mixtures, single enantiomers, individual diastereomers and diastereomeric mixtures. All such isomeric forms of the monomers are expressly included (e.g., the centers bearing CH₂OFG¹ and OFG² can both have the R configuration; or both have the S configuration; or one center can have the R configuration and the other center can have the S configuration and vice versa). The tethering attachment point is preferably nitrogen.

[0290] In certain embodiments, the carrier may be based on the piperazine ring system (F), e.g., X is N(CO)R⁷ or NR⁷, Y is NR⁸, and Z is CR¹¹R¹² or the morpholine ring system (G), e.g., X is N(CO)R⁷ or NR⁷, Y is O, and Z is CR¹¹R¹².

[chemical structure]

OFG¹ is preferably attached to a primary carbon, e.g., an exocyclic alkylene group, e.g., a methylene group, connected to one of the carbons in the six-membered ring (—CH₂OFG¹ in F or G). OFG² is preferably attached directly to one of the carbons in the six-membered rings (—OFG² in F or G). For both F and G, —CH₂OFG¹ may be attached to C-2 and OFG² may be attached to C-3; or vice versa. In certain embodiments, CH₂OFG¹ and OFG² may be geminally substituted to one of the above-referenced carbons. The piperazine- and morpholine-based monomers may therefore contain linkages (e.g., carbon-carbon bonds) wherein bond rotation is restricted about that particular linkage, e.g. restriction resulting from the presence of a ring. Thus, CH₂OFG¹ and OFG² may be cis or trans with respect to one another in any of the pairings delineated above. Accordingly, all cis/trans isomers are expressly included. The monomers may also contain one or more asymmetric centers and thus occur as racemates and racemic mixtures, single enantiomers, individual diastereomers and diastereomeric mixtures. All such isomeric forms of the monomers are expressly included (e.g., the centers bearing CH₂OFG¹ and OFG² can both have the R configuration; or both have the S configuration; or one center can have the R configuration and the other center can have the S configuration and vice versa). R′″ can be, e.g., C₁-C₆ alkyl, preferably CH₃. The tethering attachment point is preferably nitrogen in both F and G.

[0291] In certain embodiments, the carrier may be based on the morpholine ring system, e.g.,

[chemical structure]

For example, such carriers may be incorporated into the dsRNA agent with monomers such as, but not limited to,

[chemical structure]

wherein T is thymine, and

[chemical structure]

[0292] In certain embodiments, three of the preceding are incorporated at a terminus of the dsRNA agent, e.g., at the 5′-end of a sense strand. In one embodiment, three 1gT3 monomers are incorporated at the 5′ end of a sense strand. In another embodiment, two monomers independently selected from the following are incorporated at the 3′-end of a sense strand:

[chemical structure]

are incorporated at the 3′end of the sense strand. In another embodiment, two 1T4 monomers are incorporated at the 3′-end of a sense strand. In another embodiment, three 1gT3 monomers are incorporated at the 5′ end of a sense strand and two 1T4 monomers are incorporated at the 3′-end of the sense strand. See for example, WO2019/170731, WO2021/037972, WO2021/044004, and WO2022/084331, each of which are incorporated herein by reference.

[0293] In certain embodiments, the carrier may be based on the decalin ring system, e.g., X is CH₂; Y is CR⁹R¹⁰; Z is CR¹¹R¹², and R⁵ and R¹¹ together form C₆ cycloalkyl (H, z=2), or the indane ring system, e.g., X is CH₂; Y is CR⁹R¹⁰; Z is CR¹¹R¹², and R⁵ and R¹¹ together form C₅ cycloalkyl (H, z=1).

[chemical structure]

OFG¹ is preferably attached to a primary carbon, e.g., an exocyclic methylene group (n=1) or ethylene group (n=2) connected to one of C-2, C-3, C-4, or C-5 [—(CH₂)ₙOFG¹ in H]. OFG² is preferably attached directly to one of C-2, C-3, C-4, or C-5 (—OFG² in H). —(CH₂)ₙOFG¹ and OFG² may be disposed in a geminal manner on the ring, i.e., both groups may be attached to the same carbon, e.g., at C-2, C-3, C-4, or C-5. Alternatively, —(CH₂)ₙOFG¹ and OFG² may be disposed in a vicinal manner on the ring, i.e., both groups may be attached to adjacent ring carbon atoms, e.g., —(CH₂)ₙOFG¹ may be attached to C-2 and OFG² may be attached to C-3; —(CH₂)ₙOFG¹ may be attached to C-3 and OFG² may be attached to C-2; —(CH₂)ₙOFG¹ may be attached to C-3 and OFG² may be attached to C-4; or —(CH₂)ₙOFG¹ may be attached to C-4 and OFG² may be attached to C-3; —(CH₂)ₙOFG¹ may be attached to C-4 and OFG² may be attached to C-5; or —(CH₂)ₙOFG¹ may be attached to C-5 and OFG² may be attached to C-4. The decalin or indane-based monomers may therefore contain linkages (e.g., carbon-carbon bonds) wherein bond rotation is restricted about that particular linkage, e.g. restriction resulting from the presence of a ring. Thus, —(CH₂)ₙOFG¹ and OFG² may be cis or trans with respect to one another in any of the pairings delineated above. Accordingly, all cis/trans isomers are expressly included. The monomers may also contain one or more asymmetric centers and thus occur as racemates and racemic mixtures, single enantiomers, individual diastereomers and diastereomeric mixtures. All such isomeric forms of the monomers are expressly included (e.g., the centers bearing CH₂OFG¹ and OFG² can both have the R configuration; or both have the S configuration; or one center can have the R configuration and the other center can have the S configuration and vice versa). In a preferred embodiment, the substituents at C-1 and C-6 are trans with respect to one another. The tethering attachment point is preferably C-6 or C-7.

[0294] Other carriers may include those based on 3-hydroxyproline (J).

[chemical structure]

Thus, —(CH₂)ₙOFG¹ and OFG² may be cis or trans with respect to one another. Accordingly, all cis/trans isomers are expressly included. The monomers may also contain one or more asymmetric centers and thus occur as racemates and racemic mixtures, single enantiomers, individual diastereomers and diastereomeric mixtures. All such isomeric forms of the monomers are expressly included (e.g., the centers bearing CH₂OFG¹ and OFG² can both have the R configuration; or both have the S configuration; or one center can have the R configuration and the other center can have the S configuration and vice versa). The tethering attachment point is preferably nitrogen.

[0295] Details about more representative cyclic, sugar replacement-based carriers can be found in U.S. Pat. Nos. 7,745,608 and 8,017,762, which are herein incorporated by reference in their entireties.

### Sugar Replacement-Based Monomers (Acyclic)

[0296] Acyclic sugar replacement-based monomers, e.g., sugar replacement-based ligand-conjugated monomers, are also referred to herein as ribose replacement monomer subunit (RRMS) monomer compounds. Preferred acyclic carriers can have formula LCM-3 or LCM-4:

[chemical structure]

[0297] In some embodiments, each of x, y, and z can be, independently of one another, 0, 1, 2, or 3. In formula LCM-3, when y and z are different, then the tertiary carbon can have either the R or S configuration. In preferred embodiments, x is zero and y and z are each 1 in formula LCM-3 (e.g., based on serinol), and y and z are each 1 in formula LCM-3. Each of formula LCM-3 or LCM-4 below can optionally be substituted, e.g., with hydroxy, alkoxy, perhaloalkyl.

[0298] Details about more representative acyclic, sugar replacement-based carriers can be found in U.S. Pat. Nos. 7,745,608 and 8,017,762, which are herein incorporated by reference in their entireties.

[0299] In some embodiments, the dsRNA agent comprises one or more lipophilic moieties conjugated to the 5′ end of the sense strand or the 5′ end of the antisense strand.

[0300] In certain embodiments, the lipophilic moiety is conjugated to the 5′-end of a strand via a carrier and/or linker. In one embodiment, the lipophilic moiety is conjugated to the 5′-end of a strand via a carrier of a formula:

[chemical structure]

[chemical structure]

R is a ligand such as the lipophilic moiety.

[0301] In some embodiments, the dsRNA agent comprises one or more lipophilic moieties conjugated to the 3′ end of the sense strand or the 3′ end of the antisense strand.

[0302] In certain embodiments, the lipophilic moiety is conjugated to the 3′-end of a strand via a carrier and/or linker. In one embodiment, the lipophilic moiety is conjugated to the 3′-end of a strand via a carrier of formula:

[chemical structure]

[chemical structure]

R is a ligand, such as the lipophilic moiety.

[0303] In some embodiments, the dsRNA agent comprises one or more lipophilic moieties conjugated to both ends of the sense strand.

[0304] In some embodiments, the dsRNA agent comprises one or more lipophilic moieties conjugated to both ends of the antisense strand.

[0305] In some embodiments, the dsRNA agent comprises one or more lipophilic moieties conjugated to the 5′ end or 3′ end of the sense strand, and one or more lipophilic moieties conjugated to the 5′ end or 3′ end of the antisense strand.

[0306] In some embodiments, the lipophilic moiety is conjugated to the terminal end of a strand via one or more linkers (tethers) and/or a carrier.

[0307] In one embodiment, the lipophilic moiety is conjugated to the terminal end of a strand via one or more linkers (tethers).

[0308] In one embodiment, the lipophilic moiety is conjugated to the 5′ end of the sense strand or antisense strand via a cyclic carrier, optionally via one or more intervening linkers (tethers).

[0309] In some embodiments, the lipophilic moiety is conjugated to one or more internal positions on at least one strand. Internal positions of a strand refers to the nucleotide on any position of the strand, except the terminal position from the 3′ end and 5′ end of the strand (e.g., excluding 2 positions: position 1 counting from the 3′ end and position 1 counting from the 5′ end).

[0310] In one embodiment, the lipophilic moiety is conjugated to one or more internal positions on at least one strand, which include all positions except the terminal two positions from each end of the strand (e.g., excluding 4 positions: positions 1 and 2 counting from the 3′ end and positions 1 and 2 counting from the 5′ end). In one embodiment, the lipophilic moiety is conjugated to one or more internal positions on at least one strand, which include all positions except the terminal three positions from each end of the strand (e.g., excluding 6 positions: positions 1, 2, and 3 counting from the 3′ end and positions 1, 2, and 3 counting from the 5′ end).

[0311] In one embodiment, the lipophilic moiety is conjugated to one or more internal positions on at least one strand, except the cleavage site region of the sense strand, for instance, the lipophilic moiety is not conjugated to positions 9-12 counting from the 5′-end of the sense strand, for example, the lipophilic moiety is not conjugated to positions 9-11 counting from the 5′-end of the sense strand. Alternatively, the internal positions exclude positions 11-13 counting from the 3′-end of the sense strand.

[0312] In one embodiment, the lipophilic moiety is conjugated to one or more internal positions on at least one strand, which exclude the cleavage site region of the antisense strand. For instance, the internal positions exclude positions 12-14 counting from the 5′-end of the antisense strand.

[0313] In one embodiment, the lipophilic moiety is conjugated to one or more internal positions on at least one strand, which exclude positions 11-13 on the sense strand, counting from the 3′-end, and positions 12-14 on the antisense strand, counting from the 5′-end.

[0314] In one embodiment, one or more lipophilic moieties are conjugated to one or more of the following internal positions: positions 4-8 and 13-18 on the sense strand, and positions 6-10 and 15-18 on the antisense strand, counting from the 5′ end of each strand.

[0315] In one embodiment, one or more lipophilic moieties are conjugated to one or more of the following internal positions: positions 5, 6, 7, 15, and 17 on the sense strand, and positions 15 and 17 on the antisense strand, counting from the 5′ end of each strand.

[0316] In some embodiments, the lipophilic moiety is conjugated to a nucleobase, sugar moiety, or internucleosidic linkage of the dsRNA agent.

### Definitions

[0317] Unless specific definitions are provided, the nomenclature utilized in connection with, and the procedures and techniques of, analytical chemistry, synthetic organic chemistry, and medicinal and pharmaceutical chemistry described herein are those well-known and commonly used in the art. Standard techniques may be used for chemical synthesis, and chemical analysis. Certain such techniques and procedures may be found for example in “Carbohydrate Modifications in Antisense Research” Edited by Sangvi and Cook, American Chemical Society, Washington D.C., 1994; “Remington's Pharmaceutical Sciences,” Mack Publishing Co., Easton, Pa., 18th edition, 1990; and “Antisense Drug Technology, Principles, Strategies, and Applications” Edited by Stanley T. Crooke, CRC Press, Boca Raton, Fla.; and Sambrook et al., “Molecular Cloning, A laboratory Manual,” 2^{nd} Edition, Cold Spring Harbor Laboratory Press, 1989, which are hereby incorporated by reference for any purpose. Where permitted, all patents, applications, published applications and other publications and other data referred to throughout in the disclosure herein are incorporated by reference in their entirety.

[0318] Unless otherwise indicated, the following terms have the following meanings:

[0319] As used herein, the term “target nucleic acid” refers to any nucleic acid molecule the expression or activity of which is capable of being modulated by an siRNA compound. Target nucleic acids include, but are not limited to, RNA (including, but not limited to pre-mRNA and mRNA or portions thereof) transcribed from DNA encoding a target protein, and also cDNA derived from such RNA, and miRNA. For example, the target nucleic acid can be a cellular gene (or mRNA transcribed from the gene) whose expression is associated with a particular disorder or disease state. In some embodiments, a target nucleic acid can be a nucleic acid molecule from an infectious agent.

[0320] As used herein, the term “iRNA agent” refers to an agent that mediates the targeted cleavage of an RNA transcript. These agents associate with a cytoplasmic multi-protein complex known as RNAi-induced silencing complex (RISC). Agents that are effective in inducing RNA interference are also referred to herein as siRNA, RNAi agent, or simply as RNA agent or dsRNA agent. Thus, these terms can be used interchangeably herein. As used herein, the term dsRNA agent also includes microRNAs and pre-microRNAs. Moreover, the “compound” or “compounds” of the invention as used herein, also refers to the dsRNA agent, and can be used interchangeably with the dsRNA agent.

[0321] The dsRNA agent should include a region of sufficient homology to the target gene, and be of sufficient length in terms of nucleotides, such that the iRNA agent, or a fragment thereof, can mediate downregulation of the target gene. (For ease of exposition the term nucleotide or ribonucleotide is sometimes used herein in reference to one or more monomeric subunits of an iRNA agent. It will be understood herein that the usage of the term “ribonucleotide” or “nucleotide”, herein can, in the case of a modified RNA or nucleotide surrogate, also refer to a modified nucleotide, or surrogate replacement moiety at one or more positions.) Thus, the dsRNA agent is or includes a region which is at least partially, and in some embodiments fully, complementary to the target RNA. It is not necessary that there be perfect complementarity between the dsRNA agent and the target, but the correspondence must be sufficient to enable the iRNA agent, or a cleavage product thereof, to direct sequence specific silencing, e.g., by RNAi cleavage of the target RNA, e.g., mRNA. Complementarity, or degree of homology with the target strand, is most critical in the antisense strand. While perfect complementarity, particularly in the antisense strand, is often desired some embodiments can include, particularly in the antisense strand, one or more, or for example, 6, 5, 4, 3, 2, or fewer mismatches (with respect to the target RNA). The sense strand need only be sufficiently complementary with the antisense strand to maintain the over all double stranded character of the molecule.

[0322] iRNA agents include: molecules that are long enough to trigger the interferon response (which can be cleaved by Dicer (Bernstein et al. 2001. Nature, 409:363-366) and enter a RISC (RNAi-induced silencing complex)); and, molecules which are sufficiently short that they do not trigger the interferon response (which molecules can also be cleaved by Dicer and/or enter a RISC), e.g., molecules which are of a size which allows entry into a RISC, e.g., molecules which resemble Dicer-cleavage products. Molecules that are short enough that they do not trigger an interferon response are termed siRNA agents or shorter iRNA agents herein. “siRNA agent or shorter iRNA agent” as used herein, refers to an iRNA agent, e.g., a double stranded RNA agent or single strand agent, that is sufficiently short that it does not induce a deleterious interferon response in a human cell, e.g., it has a duplexed region of less than 60, 50, 40, or 30 nucleotide pairs. The siRNA agent, or a cleavage product thereof, can down regulate a target gene, e.g., by inducing RNAi with respect to a target RNA, wherein the target may comprise an endogenous or pathogen target RNA.

[0323] A “single strand iRNA agent” as used herein, is an iRNA agent which is made up of a single molecule. It may include a duplexed region, formed by intra-strand pairing, e.g., it may be, or include, a hairpin or pan-handle structure. Single strand iRNA agents may be antisense with regard to the target molecule. A single strand iRNA agent may be sufficiently long that it can enter the RISC and participate in RISC mediated cleavage of a target mRNA. A single strand iRNA agent is at least 14, and in other embodiments at least 15, 20, 25, 29, 35, 40, or 50 nucleotides in length. In certain embodiments, it is less than 200, 100, or 60 nucleotides in length.

[0324] A loop refers to a region of an iRNA strand that is unpaired with the opposing nucleotide in the duplex when a section of the iRNA strand forms base pairs with another strand or with another section of the same strand.

[0325] Hairpin iRNA agents will have a duplex region equal to or at least 17, 18, 19, 29, 21, 22, 23, 24, or 25 nucleotide pairs. The duplex region will may be equal to or less than 200, 100, or 50, in length. In certain embodiments, ranges for the duplex region are 15-30, 17 to 23, 19 to 23, and 19 to 21 nucleotides pairs in length. The hairpin may have a single strand overhang or terminal unpaired region, in some embodiments at the 3′, and in certain embodiments on the antisense side of the hairpin. In some embodiments, the overhangs are 2-3 nucleotides in length.

[0326] A “double stranded (ds) RNA agent” as used herein, includes more than one, and in some cases two, strands in which interchain hybridization can form a region of duplex structure.

[0327] As used herein, the terms “siRNA activity” and “RNAi activity” refer to gene silencing by an siRNA.

[0328] As used herein, “gene silencing” by a RNA interference molecule refers to a decrease in the mRNA level in a cell for a target gene by at least about 5%, at least about 10%, at least about 20%, at least about 30%, at least about 40%, at least about 50%, at least about 60%, at least about 70%, at least about 80%, at least about 90%, at least about 95%, at least about 99% up to and including 100%, and any integer in between of the mRNA level found in the cell without the presence of the miRNA or RNA interference molecule. In one preferred embodiment, the mRNA levels are decreased by at least about 70%, at least about 80%, at least about 90%, at least about 95%, at least about 99%, up to and including 100% and any integer in between 5% and 100%.”

[0329] As used herein the term “modulate gene expression” means that expression of the gene, or level of RNA molecule or equivalent RNA molecules encoding one or more proteins or protein subunits is up regulated or down regulated, such that expression, level, or activity is greater than or less than that observed in the absence of the modulator. For example, the term “modulate” can mean “inhibit,” but the use of the word “modulate” is not limited to this definition.

[0330] As used herein, gene expression modulation happens when the expression of the gene, or level of RNA molecule or equivalent RNA molecules encoding one or more proteins or protein subunits is at least 5%, 10%, 20%, 30%, 40%, 50%, 60%, 70%, 80%, 90%, 100%, 2-fold, 3-fold, 4-fold, 5-fold or more different from that observed in the absence of the siRNA, e.g., RNAi agent. The % and/or fold difference can be calculated relative to the control or the non-control, for example,

$$\% difference = \frac{[ expression with siRNA - expression without siRNA ]}{expression without siRNA}$$

$$\% difference = \frac{[ expression with siRNA - expression without siRNA ]}{expression without siRNA}$$

[0331] As used herein, the term “inhibit”, “down-regulate”, or “reduce” in relation to gene expression, means that the expression of the gene, or level of RNA molecules or equivalent RNA molecules encoding one or more proteins or protein subunits, or activity of one or more proteins or protein subunits, is reduced below that observed in the absence of modulator. The gene expression is down-regulated when expression of the gene, or level of RNA molecules or equivalent RNA molecules encoding one or more proteins or protein subunits, or activity of one or more proteins or protein subunits, is reduced at least 10% lower relative to a corresponding non-modulated control, and preferably at least 10%, 20%, 30%, 40%, 50%, 60%, 70%, 80%, 90%, 95%, 98%, 99% or most preferably, 100% (i.e., no gene expression).

[0332] As used herein, the term “increase” or “up-regulate” in relation to gene expression means that the expression of the gene, or level of RNA molecules or equivalent RNA molecules encoding one or more proteins or protein subunits, or activity of one or more proteins or protein subunits, is increased above that observed in the absence of modulator. The gene expression is up-regulated when expression of the gene, or level of RNA molecules or equivalent RNA molecules encoding one or more proteins or protein subunits, or activity of one or more proteins or protein subunits, is increased at least 10% relative to a corresponding non-modulated control, and preferably at least 10%, 20%, 30%, 40%, 50%, 60%, 70%, 80%, 90%, 95%, 98%, 100%, 1.1-fold, 1.25-fold, 1.5-fold, 1.75-fold, 2-fold, 3-fold, 4-fold, 5-fold, 10-fold, 50-fold, 100-fold or more.

[0333] The term “increased” or “increase” as used herein generally means an increase by a statically significant amount; for the avoidance of any doubt, “increased” means an increase of at least 10% as compared to a reference level, for example an increase of at least about 20%, or at least about 30%, or at least about 40%, or at least about 50%, or at least about 60%, or at least about 70%, or at least about 80%, or at least about 90% or up to and including a 100% increase or any increase between 10-100% as compared to a reference level, or at least about a 2-fold, or at least about a 3-fold, or at least about a 4-fold, or at least about a 5-fold or at least about a 10-fold increase, or any increase between 2-fold and 10-fold or greater as compared to a reference level.

[0334] The term “reduced” or “reduce” as used herein generally means a decrease by a statistically significant amount. However, for avoidance of doubt, “reduced” means a decrease by at least 10% as compared to a reference level, for example a decrease by at least about 20%, or at least about 30%, or at least about 40%, or at least about 50%, or at least about 60%, or at least about 70%, or at least about 80%, or at least about 90% or up to and including a 100% decrease (i.e. absent level as compared to a reference sample), or any decrease between 10-100% as compared to a reference level.

[0335] The dsRNAs comprise two oligonucleotide strands that are sufficiently complementary to hybridize to form a duplex structure. Generally, the duplex structure is between 15 and 30, more generally between 18 and 25, yet more generally between 19 and 24, and most generally between 19 and 21 base pairs in length. In some embodiments, longer dsRNAs of between 25 and 30 base pairs in length are preferred. In some embodiments, shorter dsRNAs of between 10 and 15 base pairs in length are preferred. In another embodiment, the dsRNA is at least 21 nucleotides long.

[0336] In some embodiments, the dsRNA comprises a sense strand and an antisense strand, wherein the antisense RNA strand has a region of complementarity which is complementary to at least a part of a target sequence, and the duplex region is 14-30 nucleotides in length. Similarly, the region of complementarity to the target sequence is between 14 and 30, more generally between 18 and 25, yet more generally between 19 and 24, and most generally between 19 and 21 nucleotides in length.

[0337] The phrase “antisense strand” as used herein, refers to an oligomeric compound that is substantially or 100% complementary to a target sequence of interest. The phrase “antisense strand” includes the antisense region of both oligomeric compounds that are formed from two separate strands, as well as unimolecular oligomeric compounds that are capable of forming hairpin or dumbbell type structures. The terms “antisense strand” and “guide strand” are used interchangeably herein.

[0338] The phrase “sense strand” refers to an oligomeric compound that has the same nucleoside sequence, in whole or in part, as a target sequence such as a messenger RNA or a sequence of DNA. The terms “sense strand” and “passenger strand” are used interchangeably herein.

[0339] By “specifically hybridizable” and “complementary” is meant that a nucleic acid can form hydrogen bond(s) with another nucleic acid sequence by either traditional Watson-Crick or other non-traditional types. In reference to the nucleic molecules of the present invention, the binding free energy for a nucleic acid molecule with its complementary sequence is sufficient to allow the relevant function of the nucleic acid to proceed, e.g., RNAi activity. Determination of binding free energies for nucleic acid molecules is well known in the art (see, e.g., Turner et al, 1987, CSH Symp. Quant. Biol. LII pp. 123-133; Frier et al., 1986, Proc. Nat. Acad. Sci. USA 83:9373-9377; Turner et al., 1987, /. Am. Chem. Soc. 109:3783-3785). A percent complementarity indicates the percentage of contiguous residues in a nucleic acid molecule that can form hydrogen bonds (e.g., Watson-Crick base pairing) with a second nucleic acid sequence (e.g., 5, 6, 7, 8, 9, 10 out of 10 being 50%, 60%, 70%, 80%, 90%, and 100% complementary). “Perfectly complementary” or 100% complementarity means that all the contiguous residues of a nucleic acid sequence will hydrogen bond with the same number of contiguous residues in a second nucleic acid sequence. Less than perfect complementarity refers to the situation in which some, but not all, nucleoside units of two strands can hydrogen bond with each other. “Substantial complementarity” refers to polynucleotide strands exhibiting 90% or greater complementarity, excluding regions of the polynucleotide strands, such as overhangs, that are selected so as to be noncomplementary. Specific binding requires a sufficient degree of complementarity to avoid non-specific binding of the oligomeric compound to non-target sequences under conditions in which specific binding is desired, i.e., under physiological conditions in the case of in vivo assays or therapeutic treatment, or in the case of in vitro assays, under conditions in which the assays are performed. The non-target sequences typically differ by at least 5 nucleotides.

[0340] In some embodiments, the double-stranded region of a dsRNA agent is equal to or at least, 10, 11, 12, 13, 14, 15, 16, 17, 18, 19, 20, 21, 22, 23, 23, 24, 25, 26, 27, 28, 29, 30 or more nucleotide pairs in length.

[0341] In some embodiments, the antisense strand of a dsRNA agent is equal to or at least 14, 15, 16, 17, 18, 19, 20, 21, 22, 23, 23, 24, 25, 26, 27, 28, 29, or 30 nucleotides in length.

[0342] In some embodiments, the sense strand of a dsRNA agent is equal to or at least 10, 11, 12, 13, 14, 15, 16, 17, 18, 19, 20, 21, 22, 23, 23, 24, 25, 26, 27, 28, 29, or 30 nucleotides in length.

[0343] In one embodiment, the sense and antisense strands of the dsRNA agent are each 15 to 30 nucleotides in length.

[0344] In one embodiment, the sense and antisense strands of the dsRNA agent are each 19 to 25 nucleotides in length.

[0345] In one embodiment, the sense and antisense strands of the dsRNA agent are each 21 to 23 nucleotides in length.

[0346] In some embodiments, one strand has at least one stretch of 1-5 single-stranded nucleotides in the double-stranded region. By “stretch of single-stranded nucleotides in the double-stranded region” is meant that there is present at least one nucleotide base pair at both ends of the single-stranded stretch. In some embodiments, both strands have at least one stretch of 1-5 (e.g., 1, 2, 3, 4, or 5) single-stranded nucleotides in the double stranded region. When both strands have a stretch of 1-5 (e.g., 1, 2, 3, 4, or 5) single-stranded nucleotides in the double stranded region, such single-stranded nucleotides can be opposite to each other (e.g., a stretch of mismatches) or they can be located such that the second strand has no single-stranded nucleotides opposite to the single-stranded iRNAs of the first strand and vice versa (e.g., a single-stranded loop). In some embodiments, the single-stranded nucleotides are present within 8 nucleotides from either end, for example, 8, 7, 6, 5, 4, 3, or 2 nucleotide from either the 5′ or 3′ end of the region of complementarity between the two strands.

[0347] In one embodiment, the dsRNA agent comprises a single-stranded overhang on at least one of the termini. In one embodiment, the single-stranded overhang is 1, 2, or 3 nucleotides in length.

[0348] In one embodiment, the sense strand of the dsRNA agent is 21-nucleotides in length, and the antisense strand is 23-nucleotides in length, wherein the strands form a double-stranded region of 21 consecutive base pairs having a 2-nucleotide long single-stranded overhangs at the 3′-end.

[0349] In some embodiments, each strand of the dsRNA has a ZXY structure, such as is described in PCT Publication No. 2004080406, which is hereby incorporated by reference in its entirety.

[0350] In certain embodiment, the two strands of double-stranded oligomeric compound can be linked together. The two strands can be linked to each other at both ends, or at one end only. By linking at one end is meant that 5′-end of first strand is linked to the 3′-end of the second strand or 3′-end of first strand is linked to 5′-end of the second strand. When the two strands are linked to each other at both ends, 5′-end of first strand is linked to 3′-end of second strand and 3′-end of first strand is linked to 5′-end of second strand. The two strands can be linked together by an oligonucleotide linker including, but not limited to, (N)ₙ; wherein N is independently a modified or unmodified nucleotide and n is 3-23. In some embodiments, n is 3-10, e.g., 3, 4, 5, 6, 7, 8, 9, or 10. In some embodiments, the oligonucleotide linker is selected from the group consisting of GNRA, (G)₄, (U)₄, and (dT)₄, wherein N is a modified or unmodified nucleotide and R is a modified or unmodified purine nucleotide. Some of the nucleotides in the linker can be involved in base-pair interactions with other nucleotides in the linker. The two strands can also be linked together by a non-nucleosidic linker, e.g. a linker described herein. It will be appreciated by one of skill in the art that any oligonucleotide chemical modifications or variations describe herein can be used in the oligonucleotide linker.

[0351] Hairpin and dumbbell type oligomeric compounds will have a duplex region equal to or at least 14, 15, 15, 16, 17, 18, 19, 29, 21, 22, 23, 24, or 25 nucleotide pairs. The duplex region can be equal to or less than 200, 100, or 50, in length. In some embodiments, ranges for the duplex region are 15-30, 17 to 23, 19 to 23, and 19 to 21 nucleotides pairs in length.

[0352] The hairpin oligomeric compounds can have a single strand overhang or terminal unpaired region, in some embodiments at the 3′, and in some embodiments on the antisense side of the hairpin. In some embodiments, the overhangs are 1-4, more generally 2-3 nucleotides in length. The hairpin oligomeric compounds that can induce RNA interference are also referred to as “shRNA” herein.

[0353] In certain embodiments, two oligomeric strands specifically hybridize when there is a sufficient degree of complementarity to avoid non-specific binding of the antisense compound to non-target nucleic acid sequences under conditions in which specific binding is desired, i.e., under physiological conditions in the case of in vivo assays or therapeutic treatment, and under conditions in which assays are performed in the case of in vitro assays.

[0354] As used herein, “stringent hybridization conditions” or “stringent conditions” refers to conditions under which an antisense compound will hybridize to its target sequence, but to a minimal number of other sequences. Stringent conditions are sequence-dependent and will be different in different circumstances, and “stringent conditions” under which antisense compounds hybridize to a target sequence are determined by the nature and composition of the antisense compounds and the assays in which they are being investigated.

[0355] It is understood in the art that incorporation of nucleotide affinity modifications may allow for a greater number of mismatches compared to an unmodified compound. Similarly, certain oligonucleotide sequences may be more tolerant to mismatches than other oligonucleotide sequences. One of ordinary skill in the art is capable of determining an appropriate number of mismatches between oligonucleotides, or between an oligonucleotide and a target nucleic acid, such as by determining melting temperature (Tm). Tm or ΔTm can be calculated by techniques that are familiar to one of ordinary skill in the art. For example, techniques described in Freier et al. (Nucleic Acids Research, 1997, 25, 22: 4429-4443) allow one of ordinary skill in the art to evaluate nucleotide modifications for their ability to increase the melting temperature of an RNA:DNA duplex.

siRNA Design

[0356] In one embodiment, the dsRNA agent is a double ended bluntmer of 19 nt in length, wherein the sense strand contains at least one motif of three 2′-F modifications on three consecutive nucleotides at positions 7, 8, 9 from the 5′ end. The antisense strand contains at least one motif of three 2′-O-methyl modifications on three consecutive nucleotides at positions 11, 12, 13 from the 5′ end.

[0357] In one embodiment, the dsRNA agent is a double ended bluntmer of 20 nt in length, wherein the sense strand contains at least one motif of three 2′-F modifications on three consecutive nucleotides at positions 8, 9, 10 from the 5′ end. The antisense strand contains at least one motif of three 2′-O-methyl modifications on three consecutive nucleotides at positions 11, 12, 13 from the 5′ end.

[0358] In one embodiment, the dsRNA agent is a double ended bluntmer of 21 nt in length, wherein the sense strand contains at least one motif of three 2′-F modifications on three consecutive nucleotides at positions 9, 10, 11 from the 5′ end. The antisense strand contains at least one motif of three 2′-O-methyl modifications on three consecutive nucleotides at positions 11, 12, 13 from the 5′ end.

[0359] In one embodiment, the dsRNA agent comprises a 21 nucleotides (nt) sense strand and a 23 nucleotides (nt) antisense, wherein the sense strand contains at least one motif of three 2′-F modifications on three consecutive nucleotides at positions 9, 10, 11 from the 5′ end; the antisense strand contains at least one motif of three 2′-O-methyl modifications on three consecutive nucleotides at positions 11, 12, 13 from the 5′ end, wherein one end of the iRNA is blunt, while the other end is comprises a 2 nt overhang. Preferably, the 2 nt overhang is at the 3′-end of the antisense. Optionally, the dsRNA agent further comprises a ligand (e.g., GalNAc₃).

[0360] In one embodiment, the dsRNA agent comprises a sense and antisense strands, wherein: the sense strand is 25-30 nucleotide residues in length, wherein starting from the 5′ terminal nucleotide (position 1) positions 1 to 23 of said first strand comprise at least 8 ribonucleotides; antisense strand is 36-66 nucleotide residues in length and, starting from the 3′ terminal nucleotide, comprises at least 8 ribonucleotides in the positions paired with positions 1-23 of sense strand to form a duplex; wherein at least the 3′ terminal nucleotide of antisense strand is unpaired with sense strand, and up to 6 consecutive 3′ terminal nucleotides are unpaired with sense strand, thereby forming a 3′ single stranded overhang of 1-6 nucleotides; wherein the 5′ terminus of antisense strand comprises from 10-30 consecutive nucleotides which are unpaired with sense strand, thereby forming a 10-30 nucleotide single stranded 5′ overhang; wherein at least the sense strand 5′ terminal and 3′ terminal nucleotides are base paired with nucleotides of antisense strand when sense and antisense strands are aligned for maximum complementarity, thereby forming a substantially duplexed region between sense and antisense strands; and antisense strand is sufficiently complementary to a target RNA along at least 19 ribonucleotides of antisense strand length to reduce target gene expression when said double stranded nucleic acid is introduced into a mammalian cell; and wherein the sense strand contains at least one motif of three 2′-F modifications on three consecutive nucleotides, where at least one of the motifs occurs at or near the cleavage site. The antisense strand contains at least one motif of three 2′-O-methyl modifications on three consecutive nucleotides at or near the cleavage site.

[0361] In one embodiment, the dsRNA agent comprises a sense and antisense strands, wherein said dsRNA agent comprises a first strand having a length which is at least 25 and at most 29 nucleotides and a second strand having a length which is at most 30 nucleotides with at least one motif of three 2′-O-methyl modifications on three consecutive nucleotides at position 11, 12, 13 from the 5′ end; wherein said 3′ end of said first strand and said 5′ end of said second strand form a blunt end and said second strand is 1-4 nucleotides longer at its 3′ end than the first strand, wherein the duplex region region which is at least 25 nucleotides in length, and said second strand is sufficiently complementary to a target mRNA along at least 19 nt of said second strand length to reduce target gene expression when said dsRNA agent is introduced into a mammalian cell, and wherein dicer cleavage of said iRNA preferentially results in an siRNA comprising said 3′ end of said second strand, thereby reducing expression of the target gene in the mammal. Optionally, the dsRNA agent further comprises a ligand (e.g., GalNAc₃).

[0362] In one embodiment, the sense strand of the dsRNA agent contains at least one motif of three identical modifications on three consecutive nucleotides, where one of the motifs occurs at the cleavage site in the sense strand. For instance, the sense strand can contain at least one motif of three 2′-F modifications on three consecutive nucleotides within 7-15 positions from the 5′ end.

[0363] In one embodiment, the antisense strand of the dsRNA agent can also contain at least one motif of three identical modifications on three consecutive nucleotides, where one of the motifs occurs at or near the cleavage site in the antisense strand. For instance, the antisense strand can contain at least one motif of three 2′-O-methyl modifications on three consecutive nucleotides within 9-15 positions from the 5′ end.

[0364] For dsRNA agent having a duplex region of 17-23 nt in length, the cleavage site of the antisense strand is typically around the 10, 11 and 12 positions from the 5′-end. Thus the motifs of three identical modifications may occur at the 9, 10, 11 positions; 10, 11, 12 positions; 11, 12, 13 positions; 12, 13, 14 positions; or 13, 14, 15 positions of the antisense strand, the count starting from the 1^{st} nucleotide from the 5′-end of the antisense strand, or, the count starting from the 1^{st} paired nucleotide within the duplex region from the 5′-end of the antisense strand. The cleavage site in the antisense strand may also change according to the length of the duplex region of the iRNA from the 5′-end.

[0365] In some embodiments, the dsRNA agent comprises a sense strand and antisense strand each having 14 to 30 nucleotides, wherein the sense strand contains at least two motifs of three identical modifications on three consecutive nucleotides, where at least one of the motifs occurs at or near the cleavage site within the strand and at least one of the motifs occurs at another portion of the strand that is separated from the motif at the cleavage site by at least one nucleotide. In one embodiment, the antisense strand also contains at least one motif of three identical modifications on three consecutive nucleotides, where at least one of the motifs occurs at or near the cleavage site within the strand. The modification in the motif occurring at or near the cleavage site in the sense strand is different than the modification in the motif occurring at or near the cleavage site in the antisense strand.

[0366] In some embodiments, the dsRNA agent comprises a sense strand and antisense strand each having 14 to 30 nucleotides, wherein the sense strand contains at least one motif of three 2′-F modifications on three consecutive nucleotides, where at least one of the motifs occurs at or near the cleavage site in the strand. In one embodiment, the antisense strand also contains at least one motif of three 2′-O-methyl modifications on three consecutive nucleotides at or near the cleavage site.

[0367] In some embodiments, the dsRNA agent comprises a sense strand and antisense strand each having 14 to 30 nucleotides, wherein the sense strand contains at least one motif of three 2′-F modifications on three consecutive nucleotides at positions 9, 10, 11 from the 5′ end, and wherein the antisense strand contains at least one motif of three 2′-O-methyl modifications on three consecutive nucleotides at positions 11, 12, 13 from the 5′ end.

[0368] In one embodiment, the dsRNA agent comprises mismatch(es) with the target, within the duplex, or combinations thereof. The mismatch can occur in the overhang region or the duplex region. The base pair can be ranked on the basis of their propensity to promote dissociation or melting (e.g., on the free energy of association or dissociation of a particular pairing, the simplest approach is to examine the pairs on an individual pair basis, though next neighbor or similar analysis can also be used). In terms of promoting dissociation: A:U is preferred over G:C; G:U is preferred over G:C; and I:C is preferred over G:C (I=inosine). Mismatches, e.g., non-canonical or other than canonical pairings (as described elsewhere herein) are preferred over canonical (A:T, A:U, G:C) pairings; and pairings which include a universal base are preferred over canonical pairings.

[0369] In one embodiment, the dsRNA agent comprises at least one of the first 1, 2, 3, 4, or 5 base pairs within the duplex regions from the 5′-end of the antisense strand can be chosen independently from the group of: A:U, G:U, I:C, and mismatched pairs, e.g., non-canonical or other than canonical pairings or pairings which include a universal base, to promote the dissociation of the antisense strand at the 5′-end of the duplex.

[0370] In one embodiment, the nucleotide at the 1 position within the duplex region from the 5′-end in the antisense strand is selected from the group consisting of A, dA, dU, U, and dT. Alternatively, at least one of the first 1, 2 or 3 base pair within the duplex region from the 5′-end of the antisense strand is an AU base pair. For example, the first base pair within the duplex region from the 5′-end of the antisense strand is an AU base pair.

[0371] In one aspect, the invention relates to a double-stranded RNA (dsRNA) agent for inhibiting the expression of a target gene. The dsRNA agent comprises a sense strand and an antisense strand, each strand having 14 to 40 nucleotides. The dsRNA agent is represented by formula (I):

[0372] In formula (I), B1, B2, B3, B1′, B2′, B3′, and B4′ each are independently a nucleotide containing a modification selected from the group consisting of 2′-O-alkyl, 2′-substituted alkoxy, 2′-substituted alkyl, 2′-halo, ENA, and BNA/LNA. In one embodiment, B1, B2, B3, B1′, B2′, B3′, and B4′ each contain 2′-OMe modifications. In one embodiment, B1, B2, B3, B1′, B2′, B3′, and B4′ each contain 2′-OMe or 2′-F modifications. In one embodiment, at least one of B1, B2, B3, B1′, B2′, B3′, and B4′ contain 2′-O—N-methylacetamido (2′-O—NMA) modification.

[0373] C1 is a thermally destabilizing nucleotide placed at a site opposite to the seed region of the antisense strand (i.e., at positions 2-8 of the 5′-end of the antisense strand). For example, C1 is at a position of the sense strand that pairs with a nucleotide at positions 2-8 of the 5′-end of the antisense strand. In one example, C1 is at position 15 from the 5′-end of the sense strand. C1 nucleotide bears the thermally destabilizing modification which can include abasic modification; mismatch with the opposing nucleotide in the duplex; and sugar modification such as 2′-deoxy modification or acyclic nucleotide e.g., unlocked nucleic acids (UNA) or glycerol nucleic acid (GNA). In one embodiment, C1 has thermally destabilizing modification selected from the group consisting of: i) mismatch with the opposing nucleotide in the antisense strand; ii) abasic modification selected from the group consisting of:

[chemical structure]

and iii) sugar modification selected from the group consisting of:

[chemical structure]

wherein B is a modified or unmodified nucleobase, R¹ and R² independently are H, halogen, OR₃, or alkyl; and R₃ is H, alkyl, cycloalkyl, aryl, aralkyl, heteroaryl or sugar. In one embodiment, the thermally destabilizing modification in C1 is a mismatch selected from the group consisting of G:G, G:A, G:U, G:T, A:A, A:C, C:C, C:U, C:T, U:U, T:T, and U:T; and optionally, at least one nucleobase in the mismatch pair is a 2′-deoxy nucleobase. In one example, the thermally destabilizing modification in C1 is GNA or

[chemical structure]

[0374] In another embodiment, the thermally destabilizing modification in C1 is selected from the group consisting of:

[chemical structure]

[0375] In another embodiment, the thermally destabilizing modification in C1 is

[chemical structure]

wherein R is OH, F or OMe (e.g., OH).

[0376] T1, T1′, T2′, and T3′ each independently represent a nucleotide comprising a modification providing the nucleotide a steric bulk that is less or equal to the steric bulk of a 2′-OMe modification. A steric bulk refers to the sum of steric effects of a modification. Methods for determining steric effects of a modification of a nucleotide are known to one skilled in the art. The modification can be at the 2′ position of a ribose sugar of the nucleotide, or a modification to a non-ribose nucleotide, acyclic nucleotide, or the backbone of the nucleotide that is similar or equivalent to the 2′ position of the ribose sugar, and provides the nucleotide a steric bulk that is less than or equal to the steric bulk of a 2′-OMe modification. For example, T1, T1′, T2′, and T3′ are each independently selected from DNA, RNA, LNA, 2′-F, and 2′-F-5′-methyl. In one embodiment, T1 is DNA. In one embodiment, T1′ is DNA, RNA or LNA. In one embodiment, T2′ is DNA or RNA. In one embodiment, T3′ is DNA or RNA.

[0377] n¹, n³, and q¹ are independently 4 to 15 nucleotides in length.

[0378] n⁵, q³, and q⁷ are independently 1-6 nucleotide(s) in length.

[0379] n⁴, q², and q⁶ are independently 1-3 nucleotide(s) in length; alternatively, n⁴ is 0. q⁵ is independently 0-10 nucleotide(s) in length.

[0380] n² and q⁴ are independently 0-3 nucleotide(s) in length.

[0381] Alternatively, n⁴ is 0-3 nucleotide(s) in length.

[0382] In one embodiment, n⁴ can be 0. In one example, n⁴ is 0, and q² and q⁶ are 1. In another example, n⁴ is 0, and q² and q⁶ are 1, with two phosphorothioate internucleotide linkage modifications within position 1-5 of the sense strand (counting from the 5′-end of the sense strand), and two phosphorothioate internucleotide linkage modifications at positions 1 and 2 and two phosphorothioate internucleotide linkage modifications within positions 18-23 of the antisense strand (counting from the 5′-end of the antisense strand).

[0383] In one embodiment, n⁴, q², and q⁶ are each 1.

[0384] In one embodiment, n², n⁴, q², q⁴, and q⁶ are each 1.

[0385] In one embodiment, C1 is at position 14-17 of the 5′-end of the sense strand, when the sense strand is 19-22 nucleotides in length, and n⁴ is 1. In one embodiment, C1 is at position 15 of the 5′-end of the sense strand

[0386] In one embodiment, T3′ starts at position 2 from the 5′ end of the antisense strand. In one example, T3′ is at position 2 from the 5′ end of the antisense strand and q⁶ is equal to 1.

[0387] In one embodiment, T1′ starts at position 14 from the 5′ end of the antisense strand. In one example, T1′ is at position 14 from the 5′ end of the antisense strand and q² is equal to 1.

[0388] In an exemplary embodiment, T3′ starts from position 2 from the 5′ end of the antisense strand and T1′ starts from position 14 from the 5′ end of the antisense strand. In one example, T3′ starts from position 2 from the 5′ end of the antisense strand and q⁶ is equal to 1 and T1′ starts from position 14 from the 5′ end of the antisense strand and q² is equal to 1.

[0389] In one embodiment, T1′ and T3′ are separated by 11 nucleotides in length (i.e. not counting the T1′ and T3′ nucleotides).

[0390] In one embodiment, T1′ is at position 14 from the 5′ end of the antisense strand. In one example, T1′ is at position 14 from the 5′ end of the antisense strand and q² is equal to 1, and the modification at the 2′ position or positions in a non-ribose, acyclic or backbone that provide less steric bulk than a 2′-OMe ribose.

[0391] In one embodiment, T3′ is at position 2 from the 5′ end of the antisense strand. In one example, T3′ is at position 2 from the 5′ end of the antisense strand and q⁶ is equal to 1, and the modification at the 2′ position or positions in a non-ribose, acyclic or backbone that provide less than or equal to steric bulk than a 2′-OMe ribose.

[0392] In one embodiment, T1 is at the cleavage site of the sense strand. In one example, T1 is at position 11 from the 5′ end of the sense strand, when the sense strand is 19-22 nucleotides in length, and n² is 1. In an exemplary embodiment, T1 is at the cleavage site of the sense strand at position 11 from the 5′ end of the sense strand, when the sense strand is 19-22 nucleotides in length, and n² is 1,

[0393] In one embodiment, T2′ starts at position 6 from the 5′ end of the antisense strand. In one example, T2′ is at positions 6-10 from the 5′ end of the antisense strand, and q⁴ is 1.

[0394] In an exemplary embodiment, T1 is at the cleavage site of the sense strand, for instance, at position 11 from the 5′ end of the sense strand, when the sense strand is 19-22 nucleotides in length, and n² is 1; T1′ is at position 14 from the 5′ end of the antisense strand, and q² is equal to 1, and the modification to T1′ is at the 2′ position of a ribose sugar or at positions in a non-ribose, acyclic or backbone that provide less steric bulk than a 2′-OMe ribose; T2′ is at positions 6-10 from the 5′ end of the antisense strand, and q⁴ is 1; and T3′ is at position 2 from the 5′ end of the antisense strand, and q⁶ is equal to 1, and the modification to T3′ is at the 2′ position or at positions in a non-ribose, acyclic or backbone that provide less than or equal to steric bulk than a 2′-OMe ribose.

[0395] In one embodiment, T2′ starts at position 8 from the 5′ end of the antisense strand. In one example, T2′ starts at position 8 from the 5′ end of the antisense strand, and q⁴ is 2.

In one embodiment, T2′ starts at position 9 from the 5′ end of the antisense strand. In one example, T2′ is at position 9 from the 5′ end of the antisense strand, and q⁴ is 1. In one embodiment, B1′ is 2′-OMe or 2′-F, q¹ is 9, T1′ is 2′-F, q² is 1, B2′ is 2′-OMe or 2′-F, q³ is 4, T2′ is 2′-F, q⁴ is 1, B3′ is 2′-OMe or 2′-F, q⁵ is 6, T3′ is 2′-F, q⁶ is 1, B4′ is 2′-OMe, and q⁷ is 1; with two phosphorothioate internucleotide linkage modifications within positions 1-5 of the sense strand (counting from the 5′-end of the sense strand), and two phosphorothioate internucleotide linkage modifications at positions 1 and 2 and two phosphorothioate internucleotide linkage modifications within positions 18-23 of the antisense strand (counting from the 5′-end of the antisense strand).

[0396] In one embodiment, n⁴ is 0, B3 is 2′-OMe, n⁵ is 3, B1′ is 2′-OMe or 2′-F, q¹ is 9, T1′ is 2′-F, q² is 1, B2′ is 2′-OMe or 2′-F, q³ is 4, T2′ is 2′-F, q⁴ is 1, B3′ is 2′-OMe or 2′-F, q⁵ is 6, T3′ is 2′-F, q⁶ is 1, B4′ is 2′-OMe, and q⁷ is 1; with two phosphorothioate internucleotide linkage modifications within positions 1-5 of the sense strand (counting from the 5′-end of the sense strand), and two phosphorothioate internucleotide linkage modifications at positions 1 and 2 and two phosphorothioate internucleotide linkage modifications within positions 18-23 of the antisense strand (counting from the 5′-end of the antisense strand).

[0397] In one embodiment, B1 is 2′-OMe or 2′-F, n¹ is 8, T1 is 2′F, n² is 3, B2 is 2′-OMe, n³ is 7, n⁴ is 0, B3 is 2′OMe, n⁵ is 3, B1′ is 2′-OMe or 2′-F, q¹ is 9, T1′ is 2′-F, q² is 1, B2′ is 2′-OMe or 2′-F, q³ is 4, T2′ is 2′-F, q⁴ is 2, B3′ is 2′-OMe or 2′-F, q⁵ is 5, T3′ is 2′-F, q⁶ is 1, B4′ is 2′-OMe, and q⁷ is 1.

[0398] In one embodiment, B1 is 2′-OMe or 2′-F, n¹ is 8, T1 is 2′F, n² is 3, B2 is 2′-OMe, n³ is 7, n⁴ is 0, B3 is 2′-OMe, n⁵ is 3, B1′ is 2′-OMe or 2′-F, q¹ is 9, T1′ is 2′-F, q² is 1, B2′ is 2′-OMe or 2′-F, q³ is 4, T2′ is 2′-F, q⁴ is 2, B3′ is 2′-OMe or 2′-F, q⁵ is 5, T3′ is 2′-F, q⁶ is 1, B4′ is 2′-OMe, and q⁷ is 1; with two phosphorothioate internucleotide linkage modifications within positions 1-5 of the sense strand (counting from the 5′-end of the sense strand), and two phosphorothioate internucleotide linkage modifications at positions 1 and 2 and two phosphorothioate internucleotide linkage modifications within positions 18-23 of the antisense strand (counting from the 5′-end of the antisense strand).

[0399] In one embodiment, B1 is 2′-OMe or 2′-F, n¹ is 6, T1 is 2′F, n² is 3, B2 is 2′-OMe, n³ is 7, n⁴ is 0, B3 is 2′OMe, n⁵ is 3, B1′ is 2′-OMe or 2′-F, q¹ is 7, T1′ is 2′-F, q² is 1, B2′ is 2′-OMe or 2′-F, q³ is 4, T2′ is 2′-F, q⁴ is 2, B3′ is 2′-OMe or 2′-F, q⁵ is 5, T3′ is 2′-F, q⁶ is 1, B4′ is 2′-OMe, and q⁷ is 1.

[0400] In one embodiment, B1 is 2′-OMe or 2′-F, n¹ is 6, T1 is 2′F, n² is 3, B2 is 2′-OMe, n³ is 7, n⁴ is 0, B3 is 2′-OMe, n⁵ is 3, B1′ is 2′-OMe or 2′-F, q¹ is 7, T1′ is 2′-F, q² is 1, B2′ is 2′-OMe or 2′-F, q³ is 4, T2′ is 2′-F, q⁴ is 2, B3′ is 2′-OMe or 2′-F, q⁵ is 5, T3′ is 2′-F, q⁶ is 1, B4′ is 2′-OMe, and q⁷ is 1; with two phosphorothioate internucleotide linkage modifications within positions 1-5 of the sense strand (counting from the 5′-end of the sense strand), and two phosphorothioate internucleotide linkage modifications at positions 1 and 2 and two phosphorothioate internucleotide linkage modifications within positions 18-23 of the antisense strand (counting from the 5′-end of the antisense strand).

[0401] In one embodiment, B1 is 2′-OMe or 2′-F, n¹ is 8, T1 is 2′F, n² is 3, B2 is 2′-OMe, n³ is 7, n⁴ is 0, B3 is 2′OMe, n⁵ is 3, B1′ is 2′-OMe or 2′-F, q¹ is 9, T1′ is 2′-F, q² is 1, B2′ is 2′-OMe or 2′-F, q³ is 4, T2′ is 2′-F, q⁴ is 1, B3′ is 2′-OMe or 2′-F, q⁵ is 6, T3′ is 2′-F, q⁶ is 1, B4′ is 2′-OMe, and q⁷ is 1.

[0402] In one embodiment, B1 is 2′-OMe or 2′-F, n¹ is 8, T1 is 2′F, n² is 3, B2 is 2′-OMe, n³ is 7, n⁴ is 0, B3 is 2′-OMe, n⁵ is 3, B1′ is 2′-OMe or 2′-F, q¹ is 9, T1′ is 2′-F, q² is 1, B2′ is 2′-OMe or 2′-F, q³ is 4, T2′ is 2′-F, q⁴ is 1, B3′ is 2′-OMe or 2′-F, q⁵ is 6, T3′ is 2′-F, q⁶ is 1, B4′ is 2′-OMe, and q⁷ is 1; with two phosphorothioate internucleotide linkage modifications within positions 1-5 of the sense strand (counting from the 5′-end of the sense strand), and two phosphorothioate internucleotide linkage modifications at positions 1 and 2 and two phosphorothioate internucleotide linkage modifications within positions 18-23 of the antisense strand (counting from the 5′-end of the antisense strand).

[0403] In one embodiment, B1 is 2′-OMe or 2′-F, n¹ is 8, T1 is 2′F, n² is 3, B2 is 2′-OMe, n³ is 7, n⁴ is 0, B3 is 2′OMe, n⁵ is 3, B1′ is 2′-OMe or 2′-F, q¹ is 9, T1′ is 2′-F, q² is 1, B2′ is 2′-OMe or 2′-F, q³ is 5, T2′ is 2′-F, q⁴ is 1, B3′ is 2′-OMe or 2′-F, q⁵ is 5, T3′ is 2′-F, q⁶ is 1, B4′ is 2′-OMe, and q⁷ is 1; optionally with at least 2 additional TT at the 3′-end of the antisense strand.

[0404] In one embodiment, B1 is 2′-OMe or 2′-F, n¹ is 8, T1 is 2′F, n² is 3, B2 is 2′-OMe, n³ is 7, n⁴ is 0, B3 is 2′-OMe, n⁵ is 3, B1′ is 2′-OMe or 2′-F, q¹ is 9, T1′ is 2′-F, q² is 1, B2′ is 2′-OMe or 2′-F, q³ is 5, T2′ is 2′-F, q⁴ is 1, B3′ is 2′-OMe or 2′-F, q⁵ is 5, T3′ is 2′-F, q⁶ is 1, B4′ is 2′-OMe, and q⁷ is 1; optionally with at least 2 additional TT at the 3′-end of the antisense strand; with two phosphorothioate internucleotide linkage modifications within positions 1-5 of the sense strand (counting from the 5′-end of the sense strand), and two phosphorothioate internucleotide linkage modifications at positions 1 and 2 and two phosphorothioate internucleotide linkage modifications within positions 18-23 of the antisense strand (counting from the 5′-end of the antisense strand).

[0405] In one embodiment, B1 is 2′-OMe or 2′-F, n¹ is 8, T1 is 2′F, n² is 3, B2 is 2′-OMe, n³ is 7, n⁴ is 0, B3 is 2′-OMe, n⁵ is 3, B1′ is 2′-OMe or 2′-F, q¹ is 9, T1′ is 2′-F, q² is 1, B2′ is 2′-OMe or 2′-F, q³ is 4, q⁴ is 0, B3′ is 2′-OMe or 2′-F, q⁵ is 7, T3′ is 2′-F, q⁶ is 1, B4′ is 2′-OMe, and q⁷ is 1.

[0406] In one embodiment, B1 is 2′-OMe or 2′-F, n¹ is 8, T1 is 2′F, n² is 3, B2 is 2′-OMe, n³ is 7, n⁴ is 0, B3 is 2′-OMe, n⁵ is 3, B1′ is 2′-OMe or 2′-F, q¹ is 9, T1′ is 2′-F, q² is 1, B2′ is 2′-OMe or 2′-F, q³ is 4, q⁴ is 0, B3′ is 2′-OMe or 2′-F, q⁵ is 7, T3′ is 2′-F, q⁶ is 1, B4′ is 2′-OMe, and q⁷ is 1; with two phosphorothioate internucleotide linkage modifications within positions 1-5 of the sense strand (counting from the 5′-end), and two phosphorothioate internucleotide linkage modifications at positions 1 and 2 and two phosphorothioate internucleotide linkage modifications within positions 18-23 of the antisense strand (counting from the 5′-end).

[0407] In one embodiment, B1 is 2′-OMe or 2′-F, n¹ is 8, T1 is 2′F, n² is 3, B2 is 2′-OMe, n³ is 7, n⁴ is 0, B3 is 2′OMe, n⁵ is 3, B1′ is 2′-OMe or 2′-F, q¹ is 9, T1′ is 2′-F, q² is 1, B2′ is 2′-OMe or 2′-F, q³ is 4, T2′ is 2′-F, q⁴ is 2, B3′ is 2′-OMe or 2′-F, q⁵ is 5, T3′ is 2′-F, q⁶ is 1, B4′ is 2′-F, and q⁷ is 1.

[0408] In one embodiment, B1 is 2′-OMe or 2′-F, n¹ is 8, T1 is 2′F, n² is 3, B2 is 2′-OMe, n³ is 7, n⁴ is 0, B3 is 2′-OMe, n⁵ is 3, B1′ is 2′-OMe or 2′-F, q¹ is 9, T1′ is 2′-F, q² is 1, B2′ is 2′-OMe or 2′-F, q³ is 4, T2′ is 2′-F, q⁴ is 2, B3′ is 2′-OMe or 2′-F, q⁵ is 5, T3′ is 2′-F, q⁶ is 1, B4′ is 2′-F, and q⁷ is 1; with two phosphorothioate internucleotide linkage modifications within positions 1-5 of the sense strand (counting from the 5′-end of the sense strand), and two phosphorothioate internucleotide linkage modifications at positions 1 and 2 and two phosphorothioate internucleotide linkage modifications within positions 18-23 of the antisense strand (counting from the 5′-end of the antisense strand).

[0409] In one embodiment, B1 is 2′-OMe or 2′-F, n¹ is 8, T1 is 2′F, n² is 3, B2 is 2′-OMe, n³ is 7, n⁴ is 0, B3 is 2′-OMe, n⁵ is 3, B1′ is 2′-OMe or 2′-F, q¹ is 9, T1′ is 2′-F, q² is 1, B2′ is 2′-OMe or 2′-F, q³ is 4, q⁴ is 0, B3′ is 2′-OMe or 2′-F, q⁵ is 7, T3′ is 2′-F, q⁶ is 1, B4′ is 2′-F, and q⁷ is 1.

[0410] In one embodiment, B1 is 2′-OMe or 2′-F, n¹ is 8, T1 is 2′F, n² is 3, B2 is 2′-OMe, n³ is 7, n⁴ is 0, B3 is 2′-OMe, n⁵ is 3, B1′ is 2′-OMe or 2′-F, q¹ is 9, T1′ is 2′-F, q² is 1, B2′ is 2′-OMe or 2′-F, q³ is 4, q⁴ is 0, B3′ is 2′-OMe or 2′-F, q⁵ is 7, T3′ is 2′-F, q⁶ is 1, B4′ is 2′-F, and q⁷ is 1; with two phosphorothioate internucleotide linkage modifications within positions 1-5 of the sense strand (counting from the 5′-end of the sense strand), and two phosphorothioate internucleotide linkage modifications at positions 1 and 2 and two phosphorothioate internucleotide linkage modifications within positions 18-23 of the antisense strand (counting from the 5′-end of the antisense strand).

[0411] The dsRNA agent can comprise a phosphorus-containing group at the 5′-end of the sense strand or antisense strand. The 5′-end phosphorus-containing group can be 5′-end phosphate (5′-P), 5′-end phosphorothioate (5′-PS), 5′-end phosphorodithioate (5′-PS₂), 5′-end vinylphosphonate (5′-VP), 5′-end methylphosphonate (MePhos), or 5′-deoxy-5′-C-malonyl

[chemical structure]

When the 5′-end phosphorus-containing group is 5′-end vinylphosphonate (5′-VP), the 5′-VP can be either 5′-E-VP isomer

[chemical structure]

or mixtures thereof. In other examples, the 5′-end phosphorus-containing group is

[chemical structure]

or a salt (e.g., sodium salt) thereof, wherein B is an optionally modified nucleobase (e.g., U).

[0412] In one embodiment, the dsRNA agent comprises a phosphorus-containing group at the 5′-end of the sense strand. In one embodiment, the dsRNA agent comprises a phosphorus-containing group at the 5′-end of the antisense strand.

[0413] In one embodiment, the dsRNA agent comprises a 5′-P. In one embodiment, the dsRNA agent comprises a 5′-P in the antisense strand.

[0414] In one embodiment, the dsRNA agent comprises a 5′-PS. In one embodiment, the dsRNA agent comprises a 5′-PS in the antisense strand.

[0415] In one embodiment, the dsRNA agent comprises a 5′-VP. In one embodiment, the dsRNA agent comprises a 5′-VP in the antisense strand. In one embodiment, the dsRNA agent comprises a 5′-E-VP in the antisense strand. In one embodiment, the dsRNA agent comprises a 5′-Z-VP in the antisense strand.

[0416] In one embodiment, the dsRNA agent comprises a 5′-PS₂. In one embodiment, the dsRNA agent comprises a 5′-PS₂ in the antisense strand.

[0417] In one embodiment, the dsRNA agent comprises a 5′-PS₂. In one embodiment, the dsRNA agent comprises a 5′-deoxy-5′-C-malonyl in the antisense strand.

[0418] In one embodiment, B1 is 2′-OMe or 2′-F, n¹ is 8, T1 is 2′F, n² is 3, B2 is 2′-OMe, n³ is 7, n⁴ is 0, B3 is 2′OMe, n⁵ is 3, B1′ is 2′-OMe or 2′-F, q¹ is 9, T1′ is 2′-F, q² is 1, B2′ is 2′-OMe or 2′-F, q³ is 4, T2′ is 2′-F, q⁴ is 2, B3′ is 2′-OMe or 2′-F, q⁵ is 5, T3′ is 2′-F, q⁶ is 1, B4′ is 2′-OMe, and q⁷ is 1. The dsRNA agent also comprises a 5′-PS.

[0419] In one embodiment, B1 is 2′-OMe or 2′-F, n¹ is 8, T1 is 2′F, n² is 3, B2 is 2′-OMe, n³ is 7, n⁴ is 0, B3 is 2′OMe, n⁵ is 3, B1′ is 2′-OMe or 2′-F, q¹ is 9, T1′ is 2′-F, q² is 1, B2′ is 2′-OMe or 2′-F, q³ is 4, T2′ is 2′-F, q⁴ is 2, B3′ is 2′-OMe or 2′-F, q⁵ is 5, T3′ is 2′-F, q⁶ is 1, B4′ is 2′-OMe, and q⁷ is 1. The dsRNA agent also comprises a 5′-P.

[0420] In one embodiment, B1 is 2′-OMe or 2′-F, n¹ is 8, T1 is 2′F, n² is 3, B2 is 2′-OMe, n³ is 7, n⁴ is 0, B3 is 2′OMe, n⁵ is 3, B1′ is 2′-OMe or 2′-F, q¹ is 9, T1′ is 2′-F, q² is 1, B2′ is 2′-OMe or 2′-F, q³ is 4, T2′ is 2′-F, q⁴ is 2, B3′ is 2′-OMe or 2′-F, q⁵ is 5, T3′ is 2′-F, q⁶ is 1, B4′ is 2′-OMe, and q⁷ is 1. The dsRNA agent also comprises a 5′-VP. The 5′-VP may be 5′-E-VP, 5′-Z-VP, or combination thereof.

[0421] In one embodiment, B1 is 2′-OMe or 2′-F, n¹ is 8, T1 is 2′F, n² is 3, B2 is 2′-OMe, n³ is 7, n⁴ is 0, B3 is 2′OMe, n⁵ is 3, B1′ is 2′-OMe or 2′-F, q¹ is 9, T1′ is 2′-F, q² is 1, B2′ is 2′-OMe or 2′-F, q³ is 4, T2′ is 2′-F, q⁴ is 2, B3′ is 2′-OMe or 2′-F, q⁵ is 5, T3′ is 2′-F, q⁶ is 1, B4′ is 2′-OMe, and q⁷ is 1. The dsRNA agent also comprises a 5′-PS₂.

[0422] In one embodiment, B1 is 2′-OMe or 2′-F, n¹ is 8, T1 is 2′F, n² is 3, B2 is 2′-OMe, n³ is 7, n⁴ is 0, B3 is 2′OMe, n⁵ is 3, B1′ is 2′-OMe or 2′-F, q¹ is 9, T1′ is 2′-F, q² is 1, B2′ is 2′-OMe or 2′-F, q³ is 4, T2′ is 2′-F, q⁴ is 2, B3′ is 2′-OMe or 2′-F, q⁵ is 5, T3′ is 2′-F, q⁶ is 1, B4′ is 2′-OMe, and q⁷ is 1. The dsRNA agent also comprises a 5′-deoxy-5′-C-malonyl.

[0423] In one embodiment, B1 is 2′-OMe or 2′-F, n¹ is 8, T1 is 2′F, n² is 3, B2 is 2′-OMe, n³ is 7, n⁴ is 0, B3 is 2′-OMe, n⁵ is 3, B1′ is 2′-OMe or 2′-F, q¹ is 9, T1′ is 2′-F, q² is 1, B2′ is 2′-OMe or 2′-F, q³ is 4, T2′ is 2′-F, q⁴ is 2, B3′ is 2′-OMe or 2′-F, q⁵ is 5, T3′ is 2′-F, q⁶ is 1, B4′ is 2′-OMe, and q⁷ is 1; with two phosphorothioate internucleotide linkage modifications within position 1-5 of the sense strand (counting from the 5′-end of the sense strand), and two phosphorothioate internucleotide linkage modifications at positions 1 and 2 and two phosphorothioate internucleotide linkage modifications within positions 18-23 of the antisense strand (counting from the 5′-end of the antisense strand). The dsRNA agent also comprises a 5′-P.

[0424] In one embodiment, B1 is 2′-OMe or 2′-F, n¹ is 8, T1 is 2′F, n² is 3, B2 is 2′-OMe, n³ is 7, n⁴ is 0, B3 is 2′-OMe, n⁵ is 3, B1′ is 2′-OMe or 2′-F, q¹ is 9, T1′ is 2′-F, q² is 1, B2′ is 2′-OMe or 2′-F, q³ is 4, T2′ is 2′-F, q⁴ is 2, B3′ is 2′-OMe or 2′-F, q⁵ is 5, T3′ is 2′-F, q⁶ is 1, B4′ is 2′-OMe, and q⁷ is 1; with two phosphorothioate internucleotide linkage modifications within position 1-5 of the sense strand (counting from the 5′-end of the sense strand), and two phosphorothioate internucleotide linkage modifications at positions 1 and 2 and two phosphorothioate internucleotide linkage modifications within positions 18-23 of the antisense strand (counting from the 5′-end of the antisense strand). The dsRNA agent also comprises a 5′-PS.

[0425] In one embodiment, B1 is 2′-OMe or 2′-F, n¹ is 8, T1 is 2′F, n² is 3, B2 is 2′-OMe, n³ is 7, n⁴ is 0, B3 is 2′-OMe, n⁵ is 3, B1′ is 2′-OMe or 2′-F, q¹ is 9, T1′ is 2′-F, q² is 1, B2′ is 2′-OMe or 2′-F, q³ is 4, T2′ is 2′-F, q⁴ is 2, B3′ is 2′-OMe or 2′-F, q⁵ is 5, T3′ is 2′-F, q⁶ is 1, B4′ is 2′-OMe, and q⁷ is 1; with two phosphorothioate internucleotide linkage modifications within position 1-5 of the sense strand (counting from the 5′-end of the sense strand), and two phosphorothioate internucleotide linkage modifications at positions 1 and 2 and two phosphorothioate internucleotide linkage modifications within positions 18-23 of the antisense strand (counting from the 5′-end of the antisense strand). The dsRNA agent also comprises a 5′-VP. The 5′-VP may be 5′-E-VP, 5′-Z-VP, or combination thereof.

[0426] In one embodiment, B1 is 2′-OMe or 2′-F, n¹ is 8, T1 is 2′F, n² is 3, B2 is 2′-OMe, n³ is 7, n⁴ is 0, B3 is 2′-OMe, n⁵ is 3, B1′ is 2′-OMe or 2′-F, q¹ is 9, T1′ is 2′-F, q² is 1, B2′ is 2′-OMe or 2′-F, q³ is 4, T2′ is 2′-F, q⁴ is 2, B3′ is 2′-OMe or 2′-F, q⁵ is 5, T3′ is 2′-F, q⁶ is 1, B4′ is 2′-OMe, and q⁷ is 1; with two phosphorothioate internucleotide linkage modifications within position 1-5 of the sense strand (counting from the 5′-end of the sense strand), and two phosphorothioate internucleotide linkage modifications at positions 1 and 2 and two phosphorothioate internucleotide linkage modifications within positions 18-23 of the antisense strand (counting from the 5′-end of the antisense strand). The dsRNA agent also comprises a 5′-PS₂.

[0427] In one embodiment, B1 is 2′-OMe or 2′-F, n¹ is 8, T1 is 2′F, n² is 3, B2 is 2′-OMe, n³ is 7, n⁴ is 0, B3 is 2′-OMe, n⁵ is 3, B1′ is 2′-OMe or 2′-F, q¹ is 9, T1′ is 2′-F, q² is 1, B2′ is 2′-OMe or 2′-F, q³ is 4, T2′ is 2′-F, q⁴ is 2, B3′ is 2′-OMe or 2′-F, q⁵ is 5, T3′ is 2′-F, q⁶ is 1, B4′ is 2′-OMe, and q⁷ is 1; with two phosphorothioate internucleotide linkage modifications within position 1-5 of the sense strand (counting from the 5′-end of the sense strand), and two phosphorothioate internucleotide linkage modifications at positions 1 and 2 and two phosphorothioate internucleotide linkage modifications within positions 18-23 of the antisense strand (counting from the 5′-end of the antisense strand). The dsRNA agent also comprises a 5′-deoxy-5′-C-malonyl.

[0428] In one embodiment, B1 is 2′-OMe or 2′-F, n¹ is 8, T1 is 2′F, n² is 3, B2 is 2′-OMe, n³ is 7, n⁴ is 0, B3 is 2′-OMe, n⁵ is 3, B1′ is 2′-OMe or 2′-F, q¹ is 9, T1′ is 2′-F, q² is 1, B2′ is 2′-OMe or 2′-F, q³ is 4, q⁴ is 0, B3′ is 2′-OMe or 2′-F, q⁵ is 7, T3′ is 2′-F, q⁶ is 1, B4′ is 2′-OMe, and q⁷ is 1. The dsRNA agent also comprises a 5′-P.

[0429] In one embodiment, B1 is 2′-OMe or 2′-F, n¹ is 8, T1 is 2′F, n² is 3, B2 is 2′-OMe, n³ is 7, n⁴ is 0, B3 is 2′-OMe, n⁵ is 3, B1′ is 2′-OMe or 2′-F, q¹ is 9, T1′ is 2′-F, q² is 1, B2′ is 2′-OMe or 2′-F, q³ is 4, q⁴ is 0, B3′ is 2′-OMe or 2′-F, q⁵ is 7, T3′ is 2′-F, q⁶ is 1, B4′ is 2′-OMe, and q⁷ is 1. The dsRNA agent also comprises a 5′-PS.

[0430] In one embodiment, B1 is 2′-OMe or 2′-F, n¹ is 8, T1 is 2′F, n² is 3, B2 is 2′-OMe, n³ is 7, n⁴ is 0, B3 is 2′-OMe, n⁵ is 3, B1′ is 2′-OMe or 2′-F, q¹ is 9, T1′ is 2′-F, q² is 1, B2′ is 2′-OMe or 2′-F, q³ is 4, q⁴ is 0, B3′ is 2′-OMe or 2′-F, q⁵ is 7, T3′ is 2′-F, q⁶ is 1, B4′ is 2′-OMe, and q⁷ is 1. The dsRNA agent also comprises a 5′-VP. The 5′-VP may be 5′-E-VP, 5′-Z-VP, or combination thereof.

[0431] In one embodiment, B1 is 2′-OMe or 2′-F, n¹ is 8, T1 is 2′F, n² is 3, B2 is 2′-OMe, n³ is 7, n⁴ is 0, B3 is 2′-OMe, n⁵ is 3, B1′ is 2′-OMe or 2′-F, q¹ is 9, T1′ is 2′-F, q² is 1, B2′ is 2′-OMe or 2′-F, q³ is 4, q⁴ is 0, B3′ is 2′-OMe or 2′-F, q⁵ is 7, T3′ is 2′-F, q⁶ is 1, B4′ is 2′-OMe, and q⁷ is 1. The dsRNA agent also comprises a 5′-PS₂.

[0432] In one embodiment, B1 is 2′-OMe or 2′-F, n¹ is 8, T1 is 2′F, n² is 3, B2 is 2′-OMe, n³ is 7, n⁴ is 0, B3 is 2′-OMe, n⁵ is 3, B1′ is 2′-OMe or 2′-F, q¹ is 9, T1′ is 2′-F, q² is 1, B2′ is 2′-OMe or 2′-F, q³ is 4, q⁴ is 0, B3′ is 2′-OMe or 2′-F, q⁵ is 7, T3′ is 2′-F, q⁶ is 1, B4′ is 2′-OMe, and q⁷ is 1. The dsRNA agent also comprises a 5′-deoxy-5′-C-malonyl.

[0433] In one embodiment, B1 is 2′-OMe or 2′-F, n¹ is 8, T1 is 2′F, n² is 3, B2 is 2′-OMe, n³ is 7, n⁴ is 0, B3 is 2′-OMe, n⁵ is 3, B1′ is 2′-OMe or 2′-F, q¹ is 9, T1′ is 2′-F, q² is 1, B2′ is 2′-OMe or 2′-F, q³ is 4, q⁴ is 0, B3′ is 2′-OMe or 2′-F, q⁵ is 7, T3′ is 2′-F, q⁶ is 1, B4′ is 2′-OMe, and q⁷ is 1; with two phosphorothioate internucleotide linkage modifications within position 1-5 of the sense strand (counting from the 5′-end), and two phosphorothioate internucleotide linkage modifications at positions 1 and 2 and two phosphorothioate internucleotide linkage modifications within positions 18-23 of the antisense strand (counting from the 5′-end). The dsRNA agent also comprises a 5′-P.

[0434] In one embodiment, B1 is 2′-OMe or 2′-F, n¹ is 8, T1 is 2′F, n² is 3, B2 is 2′-OMe, n³ is 7, n⁴ is 0, B3 is 2′-OMe, n⁵ is 3, B1′ is 2′-OMe or 2′-F, q¹ is 9, T1′ is 2′-F, q² is 1, B2′ is 2′-OMe or 2′-F, q³ is 4, q⁴ is 0, B3′ is 2′-OMe or 2′-F, q⁵ is 7, T3′ is 2′-F, q⁶ is 1, B4′ is 2′-OMe, and q⁷ is 1; with two phosphorothioate internucleotide linkage modifications within position 1-5 of the sense strand (counting from the 5′-end), and two phosphorothioate internucleotide linkage modifications at positions 1 and 2 and two phosphorothioate internucleotide linkage modifications within positions 18-23 of the antisense strand (counting from the 5′-end). The dsRNA agent also comprises a 5′-PS.

[0435] In one embodiment, B1 is 2′-OMe or 2′-F, n¹ is 8, T1 is 2′F, n² is 3, B2 is 2′-OMe, n³ is 7, n⁴ is 0, B3 is 2′-OMe, n⁵ is 3, B1′ is 2′-OMe or 2′-F, q¹ is 9, T1′ is 2′-F, q² is 1, B2′ is 2′-OMe or 2′-F, q³ is 4, q⁴ is 0, B3′ is 2′-OMe or 2′-F, q⁵ is 7, T3′ is 2′-F, q⁶ is 1, B4′ is 2′-OMe, and q⁷ is 1; with two phosphorothioate internucleotide linkage modifications within position 1-5 of the sense strand (counting from the 5′-end), and two phosphorothioate internucleotide linkage modifications at positions 1 and 2 and two phosphorothioate internucleotide linkage modifications within positions 18-23 of the antisense strand (counting from the 5′-end). The dsRNA agent also comprises a 5′-VP. The 5′-VP may be 5′-E-VP, 5′-Z-VP, or combination thereof.

[0436] In one embodiment, B1 is 2′-OMe or 2′-F, n¹ is 8, T1 is 2′F, n² is 3, B2 is 2′-OMe, n³ is 7, n⁴ is 0, B3 is 2′-OMe, n⁵ is 3, B1′ is 2′-OMe or 2′-F, q¹ is 9, T1′ is 2′-F, q² is 1, B2′ is 2′-OMe or 2′-F, q³ is 4, q⁴ is 0, B3′ is 2′-OMe or 2′-F, q⁵ is 7, T3′ is 2′-F, q⁶ is 1, B4′ is 2′-OMe, and q⁷ is 1; with two phosphorothioate internucleotide linkage modifications within position 1-5 of the sense strand (counting from the 5′-end), and two phosphorothioate internucleotide linkage modifications at positions 1 and 2 and two phosphorothioate internucleotide linkage modifications within positions 18-23 of the antisense strand (counting from the 5′-end). The dsRNA agent also comprises a 5′-PS₂.

[0437] In one embodiment, B1 is 2′-OMe or 2′-F, n¹ is 8, T1 is 2′F, n² is 3, B2 is 2′-OMe, n³ is 7, n⁴ is 0, B3 is 2′-OMe, n⁵ is 3, B1′ is 2′-OMe or 2′-F, q¹ is 9, T1′ is 2′-F, q² is 1, B2′ is 2′-OMe or 2′-F, q³ is 4, q⁴ is 0, B3′ is 2′-OMe or 2′-F, q⁵ is 7, T3′ is 2′-F, q⁶ is 1, B4′ is 2′-OMe, and q⁷ is 1; with two phosphorothioate internucleotide linkage modifications within position 1-5 of the sense strand (counting from the 5′-end), and two phosphorothioate internucleotide linkage modifications at positions 1 and 2 and two phosphorothioate internucleotide linkage modifications within positions 18-23 of the antisense strand (counting from the 5′-end). The dsRNA agent also comprises a 5′-deoxy-5′-C-malonyl.

[0438] In one embodiment, B1 is 2′-OMe or 2′-F, n¹ is 8, T1 is 2′F, n² is 3, B2 is 2′-OMe, n³ is 7, n⁴ is 0, B3 is 2′OMe, n⁵ is 3, B1′ is 2′-OMe or 2′-F, q¹ is 9, T1′ is 2′-F, q² is 1, B2′ is 2′-OMe or 2′-F, q³ is 4, T2′ is 2′-F, q⁴ is 2, B3′ is 2′-OMe or 2′-F, q⁵ is 5, T3′ is 2′-F, q⁶ is 1, B4′ is 2′-F, and q⁷ is 1. The dsRNA agent also comprises a 5′-P.

[0439] In one embodiment, B1 is 2′-OMe or 2′-F, n¹ is 8, T1 is 2′F, n² is 3, B2 is 2′-OMe, n³ is 7, n⁴ is 0, B3 is 2′OMe, n⁵ is 3, B1′ is 2′-OMe or 2′-F, q¹ is 9, T1′ is 2′-F, q² is 1, B2′ is 2′-OMe or 2′-F, q³ is 4, T2′ is 2′-F, q⁴ is 2, B3′ is 2′-OMe or 2′-F, q⁵ is 5, T3′ is 2′-F, q⁶ is 1, B4′ is 2′-F, and q⁷ is 1. The dsRNA agent also comprises a 5′-PS.

[0440] In one embodiment, B1 is 2′-OMe or 2′-F, n¹ is 8, T1 is 2′F, n² is 3, B2 is 2′-OMe, n³ is 7, n⁴ is 0, B3 is 2′OMe, n⁵ is 3, B1′ is 2′-OMe or 2′-F, q¹ is 9, T1′ is 2′-F, q² is 1, B2′ is 2′-OMe or 2′-F, q³ is 4, T2′ is 2′-F, q⁴ is 2, B3′ is 2′-OMe or 2′-F, q⁵ is 5, T3′ is 2′-F, q⁶ is 1, B4′ is 2′-F, and q⁷ is 1. The dsRNA agent also comprises a 5′-VP. The 5′-VP may be 5′-E-VP, 5′-Z-VP, or combination thereof.

[0441] In one embodiment, B1 is 2′-OMe or 2′-F, n¹ is 8, T1 is 2′F, n² is 3, B2 is 2′-OMe, n³ is 7, n⁴ is 0, B3 is 2′OMe, n⁵ is 3, B1′ is 2′-OMe or 2′-F, q¹ is 9, T1′ is 2′-F, q² is 1, B2′ is 2′-OMe or 2′-F, q³ is 4, T2′ is 2′-F, q⁴ is 2, B3′ is 2′-OMe or 2′-F, q⁵ is 5, T3′ is 2′-F, q⁶ is 1, B4′ is 2′-F, and q⁷ is 1. The dsRNA agent also comprises a 5′-PS₂.

[0442] In one embodiment, B1 is 2′-OMe or 2′-F, n¹ is 8, T1 is 2′F, n² is 3, B2 is 2′-OMe, n³ is 7, n⁴ is 0, B3 is 2′OMe, n⁵ is 3, B1′ is 2′-OMe or 2′-F, q¹ is 9, T1′ is 2′-F, q² is 1, B2′ is 2′-OMe or 2′-F, q³ is 4, T2′ is 2′-F, q⁴ is 2, B3′ is 2′-OMe or 2′-F, q⁵ is 5, T3′ is 2′-F, q⁶ is 1, B4′ is 2′-F, and q⁷ is 1. The dsRNA agent also comprises a 5′-deoxy-5′-C-malonyl.

[0443] In one embodiment, B1 is 2′-OMe or 2′-F, n¹ is 8, T1 is 2′F, n² is 3, B2 is 2′-OMe, n³ is 7, n⁴ is 0, B3 is 2′-OMe, n⁵ is 3, B1′ is 2′-OMe or 2′-F, q¹ is 9, T1′ is 2′-F, q² is 1, B2′ is 2′-OMe or 2′-F, q³ is 4, T2′ is 2′-F, q⁴ is 2, B3′ is 2′-OMe or 2′-F, q⁵ is 5, T3′ is 2′-F, q⁶ is 1, B4′ is 2′-F, and q⁷ is 1; with two phosphorothioate internucleotide linkage modifications within position 1-5 of the sense strand (counting from the 5′-end of the sense strand), and two phosphorothioate internucleotide linkage modifications at positions 1 and 2 and two phosphorothioate internucleotide linkage modifications within positions 18-23 of the antisense strand (counting from the 5′-end of the antisense strand). The dsRNA agent also comprises a 5′-P.

[0444] In one embodiment, B1 is 2′-OMe or 2′-F, n¹ is 8, T1 is 2′F, n² is 3, B2 is 2′-OMe, n³ is 7, n⁴ is 0, B3 is 2′-OMe, n⁵ is 3, B1′ is 2′-OMe or 2′-F, q¹ is 9, T1′ is 2′-F, q² is 1, B2′ is 2′-OMe or 2′-F, q³ is 4, T2′ is 2′-F, q⁴ is 2, B3′ is 2′-OMe or 2′-F, q⁵ is 5, T3′ is 2′-F, q⁶ is 1, B4′ is 2′-F, and q⁷ is 1; with two phosphorothioate internucleotide linkage modifications within position 1-5 of the sense strand (counting from the 5′-end of the sense strand), and two phosphorothioate internucleotide linkage modifications at positions 1 and 2 and two phosphorothioate internucleotide linkage modifications within positions 18-23 of the antisense strand (counting from the 5′-end of the antisense strand). The dsRNA agent also comprises a 5′-PS.

[0445] In one embodiment, B1 is 2′-OMe or 2′-F, n¹ is 8, T1 is 2′F, n² is 3, B2 is 2′-OMe, n³ is 7, n⁴ is 0, B3 is 2′-OMe, n⁵ is 3, B1′ is 2′-OMe or 2′-F, q¹ is 9, T1′ is 2′-F, q² is 1, B2′ is 2′-OMe or 2′-F, q³ is 4, T2′ is 2′-F, q⁴ is 2, B3′ is 2′-OMe or 2′-F, q⁵ is 5, T3′ is 2′-F, q⁶ is 1, B4′ is 2′-F, and q⁷ is 1; with two phosphorothioate internucleotide linkage modifications within position 1-5 of the sense strand (counting from the 5′-end of the sense strand), and two phosphorothioate internucleotide linkage modifications at positions 1 and 2 and two phosphorothioate internucleotide linkage modifications within positions 18-23 of the antisense strand (counting from the 5′-end of the antisense strand). The dsRNA agent also comprises a 5′-VP. The 5′-VP may be 5′-E-VP, 5′-Z-VP, or combination thereof.

[0446] In one embodiment, B1 is 2′-OMe or 2′-F, n¹ is 8, T1 is 2′F, n² is 3, B2 is 2′-OMe, n³ is 7, n⁴ is 0, B3 is 2′-OMe, n⁵ is 3, B1′ is 2′-OMe or 2′-F, q¹ is 9, T1′ is 2′-F, q² is 1, B2′ is 2′-OMe or 2′-F, q³ is 4, T2′ is 2′-F, q⁴ is 2, B3′ is 2′-OMe or 2′-F, q⁵ is 5, T3′ is 2′-F, q⁶ is 1, B4′ is 2′-F, and q⁷ is 1; with two phosphorothioate internucleotide linkage modifications within position 1-5 of the sense strand (counting from the 5′-end of the sense strand), and two phosphorothioate internucleotide linkage modifications at positions 1 and 2 and two phosphorothioate internucleotide linkage modifications within positions 18-23 of the antisense strand (counting from the 5′-end of the antisense strand). The dsRNA agent also comprises a 5′-PS₂.

[0447] In one embodiment, B1 is 2′-OMe or 2′-F, n¹ is 8, T1 is 2′F, n² is 3, B2 is 2′-OMe, n³ is 7, n⁴ is 0, B3 is 2′-OMe, n⁵ is 3, B1′ is 2′-OMe or 2′-F, q¹ is 9, T1′ is 2′-F, q² is 1, B2′ is 2′-OMe or 2′-F, q³ is 4, T2′ is 2′-F, q⁴ is 2, B3′ is 2′-OMe or 2′-F, q⁵ is 5, T3′ is 2′-F, q⁶ is 1, B4′ is 2′-F, and q⁷ is 1; with two phosphorothioate internucleotide linkage modifications within position 1-5 of the sense strand (counting from the 5′-end of the sense strand), and two phosphorothioate internucleotide linkage modifications at positions 1 and 2 and two phosphorothioate internucleotide linkage modifications within positions 18-23 of the antisense strand (counting from the 5′-end of the antisense strand). The dsRNA agent also comprises a 5′-deoxy-5′-C-malonyl.

[0448] In one embodiment, B1 is 2′-OMe or 2′-F, n¹ is 8, T1 is 2′F, n² is 3, B2 is 2′-OMe, n³ is 7, n⁴ is 0, B3 is 2′-OMe, n⁵ is 3, B1′ is 2′-OMe or 2′-F, q¹ is 9, T1′ is 2′-F, q² is 1, B2′ is 2′-OMe or 2′-F, q³ is 4, q⁴ is 0, B3′ is 2′-OMe or 2′-F, q⁵ is 7, T3′ is 2′-F, q⁶ is 1, B4′ is 2′-F, and q⁷ is 1. The dsRNA agent also comprises a 5′-P.

[0449] In one embodiment, B1 is 2′-OMe or 2′-F, n¹ is 8, T1 is 2′F, n² is 3, B2 is 2′-OMe, n³ is 7, n⁴ is 0, B3 is 2′-OMe, n⁵ is 3, B1′ is 2′-OMe or 2′-F, q¹ is 9, T1′ is 2′-F, q² is 1, B2′ is 2′-OMe or 2′-F, q³ is 4, q⁴ is 0, B3′ is 2′-OMe or 2′-F, q⁵ is 7, T3′ is 2′-F, q⁶ is 1, B4′ is 2′-F, and q⁷ is 1. The dsRNA agent also comprises a 5′-PS.

[0450] In one embodiment, B1 is 2′-OMe or 2′-F, n¹ is 8, T1 is 2′F, n² is 3, B2 is 2′-OMe, n³ is 7, n⁴ is 0, B3 is 2′-OMe, n⁵ is 3, B1′ is 2′-OMe or 2′-F, q¹ is 9, T1′ is 2′-F, q² is 1, B2′ is 2′-OMe or 2′-F, q³ is 4, q⁴ is 0, B3′ is 2′-OMe or 2′-F, q⁵ is 7, T3′ is 2′-F, q⁶ is 1, B4′ is 2′-F, and q⁷ is 1. The dsRNA agent also comprises a 5′-VP. The 5′-VP may be 5′-E-VP, 5′-Z-VP, or combination thereof.

[0451] In one embodiment, B1 is 2′-OMe or 2′-F, n¹ is 8, T1 is 2′F, n² is 3, B2 is 2′-OMe, n³ is 7, n⁴ is 0, B3 is 2′-OMe, n⁵ is 3, B1′ is 2′-OMe or 2′-F, q¹ is 9, T1′ is 2′-F, q² is 1, B2′ is 2′-OMe or 2′-F, q³ is 4, q⁴ is 0, B3′ is 2′-OMe or 2′-F, q⁵ is 7, T3′ is 2′-F, q⁶ is 1, B4′ is 2′-F, and q⁷ is 1. The dsRNA agent also comprises a 5′-PS₂.

[0452] In one embodiment, B1 is 2′-OMe or 2′-F, n¹ is 8, T1 is 2′F, n² is 3, B2 is 2′-OMe, n³ is 7, n⁴ is 0, B3 is 2′-OMe, n⁵ is 3, B1′ is 2′-OMe or 2′-F, q¹ is 9, T1′ is 2′-F, q² is 1, B2′ is 2′-OMe or 2′-F, q³ is 4, q⁴ is 0, B3′ is 2′-OMe or 2′-F, q⁵ is 7, T3′ is 2′-F, q⁶ is 1, B4′ is 2′-F, and q⁷ is 1. The dsRNA agent also comprises a 5′-deoxy-5′-C-malonyl.

[0453] In one embodiment, B1 is 2′-OMe or 2′-F, n¹ is 8, T1 is 2′F, n² is 3, B2 is 2′-OMe, n³ is 7, n⁴ is 0, B3 is 2′-OMe, n⁵ is 3, B1′ is 2′-OMe or 2′-F, q¹ is 9, T1′ is 2′-F, q² is 1, B2′ is 2′-OMe or 2′-F, q³ is 4, q⁴ is 0, B3′ is 2′-OMe or 2′-F, q⁵ is 7, T3′ is 2′-F, q⁶ is 1, B4′ is 2′-F, and q⁷ is 1; with two phosphorothioate internucleotide linkage modifications within position 1-5 of the sense strand (counting from the 5′-end of the sense strand), and two phosphorothioate internucleotide linkage modifications at positions 1 and 2 and two phosphorothioate internucleotide linkage modifications within positions 18-23 of the antisense strand (counting from the 5′-end of the antisense strand). The dsRNA agent also comprises a 5′-P.

[0454] In one embodiment, B1 is 2′-OMe or 2′-F, n¹ is 8, T1 is 2′F, n² is 3, B2 is 2′-OMe, n³ is 7, n⁴ is 0, B3 is 2′-OMe, n⁵ is 3, B1′ is 2′-OMe or 2′-F, q¹ is 9, T1′ is 2′-F, q² is 1, B2′ is 2′-OMe or 2′-F, q³ is 4, q⁴ is 0, B3′ is 2′-OMe or 2′-F, q⁵ is 7, T3′ is 2′-F, q⁶ is 1, B4′ is 2′-F, and q⁷ is 1; with two phosphorothioate internucleotide linkage modifications within position 1-5 of the sense strand (counting from the 5′-end of the sense strand), and two phosphorothioate internucleotide linkage modifications at positions 1 and 2 and two phosphorothioate internucleotide linkage modifications within positions 18-23 of the antisense strand (counting from the 5′-end of the antisense strand). The dsRNA agent also comprises a 5′-PS.

[0455] In one embodiment, B1 is 2′-OMe or 2′-F, n¹ is 8, T1 is 2′F, n² is 3, B2 is 2′-OMe, n³ is 7, n⁴ is 0, B3 is 2′-OMe, n⁵ is 3, B1′ is 2′-OMe or 2′-F, q¹ is 9, T1′ is 2′-F, q² is 1, B2′ is 2′-OMe or 2′-F, q³ is 4, q⁴ is 0, B3′ is 2′-OMe or 2′-F, q⁵ is 7, T3′ is 2′-F, q⁶ is 1, B4′ is 2′-F, and q⁷ is 1; with two phosphorothioate internucleotide linkage modifications within position 1-5 of the sense strand (counting from the 5′-end of the sense strand), and two phosphorothioate internucleotide linkage modifications at positions 1 and 2 and two phosphorothioate internucleotide linkage modifications within positions 18-23 of the antisense strand (counting from the 5′-end of the antisense strand). The dsRNA agent also comprises a 5′-VP. The 5′-VP may be 5′-E-VP, 5′-Z-VP, or combination thereof.

[0456] In one embodiment, B1 is 2′-OMe or 2′-F, n¹ is 8, T1 is 2′F, n² is 3, B2 is 2′-OMe, n³ is 7, n⁴ is 0, B3 is 2′-OMe, n⁵ is 3, B1′ is 2′-OMe or 2′-F, q¹ is 9, T1′ is 2′-F, q² is 1, B2′ is 2′-OMe or 2′-F, q³ is 4, q⁴ is 0, B3′ is 2′-OMe or 2′-F, q⁵ is 7, T3′ is 2′-F, q⁶ is 1, B4′ is 2′-F, and q⁷ is 1; with two phosphorothioate internucleotide linkage modifications within position 1-5 of the sense strand (counting from the 5′-end of the sense strand), and two phosphorothioate internucleotide linkage modifications at positions 1 and 2 and two phosphorothioate internucleotide linkage modifications within positions 18-23 of the antisense strand (counting from the 5′-end of the antisense strand). The dsRNA agent also comprises a 5′-PS₂.

[0457] In one embodiment, B1 is 2′-OMe or 2′-F, n¹ is 8, T1 is 2′F, n² is 3, B2 is 2′-OMe, n³ is 7, n⁴ is 0, B3 is 2′-OMe, n⁵ is 3, B1′ is 2′-OMe or 2′-F, q¹ is 9, T1′ is 2′-F, q² is 1, B2′ is 2′-OMe or 2′-F, q³ is 4, q⁴ is 0, B3′ is 2′-OMe or 2′-F, q⁵ is 7, T3′ is 2′-F, q⁶ is 1, B4′ is 2′-F, and q⁷ is 1; with two phosphorothioate internucleotide linkage modifications within position 1-5 of the sense strand (counting from the 5′-end of the sense strand), and two phosphorothioate internucleotide linkage modifications at positions 1 and 2 and two phosphorothioate internucleotide linkage modifications within positions 18-23 of the antisense strand (counting from the 5′-end of the antisense strand). The dsRNA agent also comprises a 5′-deoxy-5′-C-malonyl.

[0458] In one embodiment, 100%, 95%, 90%, 85%, 80%, 75%, 70%, 65%, 60%, 55%, 50%, 45%, 40%, 35% or 30% of the dsRNA agent is modified. For example, when 50% of the dsRNA agent is modified, 50% of all nucleotides present in the dsRNA agent contain a modification as described herein.

[0459] In one embodiment, each of the sense and antisense strands of the dsRNA agent is independently modified with acyclic nucleotides, LNA, HNA, CeNA, 2′-methoxyethyl, 2′-O-methyl, 2′-O-allyl, 2′-C-allyl, 2′-deoxy, 2′-fluoro, 2′-O—N-methylacetamido (2′-O—NMA), a 2′-O-dimethylaminoethoxyethyl (2′-O-DMAEOE), 2′-O-aminopropyl (2′-O-AP), or 2′-ara-F.

[0460] In one embodiment, each of the sense and antisense strands of the dsRNA agent contains at least two different modifications.

[0461] In one embodiment, the dsRNA agent of Formula (I) further comprises 3′ and/or 5′ overhang(s) of 1-10 nucleotides in length. In one example, dsRNA agent of formula (I) comprises a 3′ overhang at the 3′-end of the antisense strand and a blunt end at the 5′-end of the antisense strand. In another example, the dsRNA agent has a 5′ overhang at the 5′-end of the sense strand.

[0462] In one embodiment, the dsRNA agent does not contain any 2′-F modification.

[0463] In one embodiment, the sense strand and/or antisense strand of the dsRNA agent comprises one or more blocks of phosphorothioate or methylphosphonate internucleotide linkages. In one example, the sense strand comprises one block of two phosphorothioate or methylphosphonate internucleotide linkages. In one example, the antisense strand comprises two blocks of two phosphorothioate or methylphosphonate internucleotide linkages. For example, the two blocks of phosphorothioate or methylphosphonate internucleotide linkages are separated by 16-18 phosphate internucleotide linkages.

[0464] In one embodiment, each of the sense and antisense strands of the dsRNA agent has 15-30 nucleotides. In one example, the sense strand has 19-22 nucleotides, and the antisense strand has 19-25 nucleotides. In another example, the sense strand has 21 nucleotides, and the antisense strand has 23 nucleotides.

[0465] In one embodiment, the nucleotide at position 1 of the 5′-end of the antisense strand in the duplex is selected from the group consisting of A, dA, dU, U, and dT. In one embodiment, at least one of the first, second, and third base pair from the 5′-end of the antisense strand is an AU base pair.

[0466] In one embodiment, the antisense strand of the dsRNA agent is 100% complementary to a target RNA to hybridize thereto and inhibits its expression through RNA interference. In another embodiment, the antisense strand of the dsRNA agent is at least 95%, at least 90%, at least 85%, at least 80%, at least 75%, at least 70%, at least 65%, at least 60%, at least 55%, or at least 50% complementary to a target RNA.

[0467] In one aspect, the invention relates to a dsRNA agent as defined herein capable of inhibiting the expression of a target gene. The dsRNA agent comprises a sense strand and an antisense strand, each strand having 14 to 40 nucleotides. The sense strand contains at least one thermally destabilizing nucleotide, wherein at least one of said thermally destabilizing nucleotide occurs at or near the site that is opposite to the seed region of the antisense strand (i.e. at position 2-8 of the 5′-end of the antisense strand). Each of the embodiments and aspects described in this specification relating to the dsRNA represented by formula (I) can also apply to the dsRNA containing the thermally destabilizing nucleotide.

[0468] The thermally destabilizing nucleotide can occur, for example, between positions 14-17 of the 5′-end of the sense strand when the sense strand is 21 nucleotides in length. The antisense strand contains at least two modified nucleic acids that are smaller than a sterically demanding 2′-OMe modification. Preferably, the two modified nucleic acids that are smaller than a sterically demanding 2′-OMe are separated by 11 nucleotides in length. For example, the two modified nucleic acids are at positions 2 and 14 of the 5′ end of the antisense strand.

[0469] In one embodiment, the dsRNA agent further comprises at least one ASGPR ligand. For example, the ASGPR ligand is one or more GalNAc derivatives attached through a bivalent or trivalent branched linker, such as:

[chemical structure]

In one example, the ASGPR ligand is attached to the 3′ end of the sense strand.

[0470] For example, the dsRNA agent as defined herein can comprise i) a phosphorus-containing group at the 5′-end of the sense strand or antisense strand; ii) with two phosphorothioate internucleotide linkage modifications within position 1-5 of the sense strand (counting from the 5′-end of the sense strand), and two phosphorothioate internucleotide linkage modifications at positions 1 and 2 and two phosphorothioate internucleotide linkage modifications within positions 18-23 of the antisense strand (counting from the 5′-end of the antisense strand); and iii) a ligand, such as a ASGPR ligand (e.g., one or more GalNAc derivatives) at 5′-end or 3′-end of the sense strand or antisense strand. For instance, the ligand may be at the 3′-end of the sense strand.

[0471] In one embodiment, B1 is 2′-OMe or 2′-F, n¹ is 8, T1 is 2′F, n² is 3, B2 is 2′-OMe, n³ is 7, n⁴ is 0, B3 is 2′-OMe, n⁵ is 3, B1′ is 2′-OMe or 2′-F, q¹ is 9, T1′ is 2′-F, q² is 1, B2′ is 2′-OMe or 2′-F, q³ is 4, T2′ is 2′-F, q⁴ is 2, B3′ is 2′-OMe or 2′-F, q⁵ is 5, T3′ is 2′-F, q⁶ is 1, B4′ is 2′-OMe, and q⁷ is 1; with two phosphorothioate internucleotide linkage modifications within position 1-5 of the sense strand (counting from the 5′-end of the sense strand), and two phosphorothioate internucleotide linkage modifications at positions 1 and 2 and two phosphorothioate internucleotide linkage modifications within positions 18-23 of the antisense strand (counting from the 5′-end of the antisense strand). The dsRNA agent also comprises a 5′-P and a targeting ligand. In one embodiment, the 5′-P is at the 5′-end of the antisense strand, and the targeting ligand is at the 3′-end of the sense strand.

[0472] In one embodiment, B1 is 2′-OMe or 2′-F, n¹ is 8, T1 is 2′F, n² is 3, B2 is 2′-OMe, n³ is 7, n⁴ is 0, B3 is 2′-OMe, n⁵ is 3, B1′ is 2′-OMe or 2′-F, q¹ is 9, T1′ is 2′-F, q² is 1, B2′ is 2′-OMe or 2′-F, q³ is 4, T2′ is 2′-F, q⁴ is 2, B3′ is 2′-OMe or 2′-F, q⁵ is 5, T3′ is 2′-F, q⁶ is 1, B4′ is 2′-OMe, and q⁷ is 1; with two phosphorothioate internucleotide linkage modifications within position 1-5 of the sense strand (counting from the 5′-end of the sense strand), and two phosphorothioate internucleotide linkage modifications at positions 1 and 2 and two phosphorothioate internucleotide linkage modifications within positions 18-23 of the antisense strand (counting from the 5′-end of the antisense strand). The dsRNA agent also comprises a 5′-PS and a targeting ligand. In one embodiment, the 5′-PS is at the 5′-end of the antisense strand, and the targeting ligand is at the 3′-end of the sense strand.

[0473] In one embodiment, B1 is 2′-OMe or 2′-F, n¹ is 8, T1 is 2′F, n² is 3, B2 is 2′-OMe, n³ is 7, n⁴ is 0, B3 is 2′-OMe, n⁵ is 3, B1′ is 2′-OMe or 2′-F, q¹ is 9, T1′ is 2′-F, q² is 1, B2′ is 2′-OMe or 2′-F, q³ is 4, T2′ is 2′-F, q⁴ is 2, B3′ is 2′-OMe or 2′-F, q⁵ is 5, T3′ is 2′-F, q⁶ is 1, B4′ is 2′-OMe, and q⁷ is 1; with two phosphorothioate internucleotide linkage modifications within position 1-5 of the sense strand (counting from the 5′-end of the sense strand), and two phosphorothioate internucleotide linkage modifications at positions 1 and 2 and two phosphorothioate internucleotide linkage modifications within positions 18-23 of the antisense strand (counting from the 5′-end of the antisense strand). The dsRNA agent also comprises a 5′-VP (e.g., a 5′-E-VP, 5′-Z-VP, or combination thereof), and a targeting ligand. In one embodiment, the 5′-VP is at the 5′-end of the antisense strand, and the targeting ligand is at the 3′-end of the sense strand.

[0474] In one embodiment, B1 is 2′-OMe or 2′-F, n¹ is 8, T1 is 2′F, n² is 3, B2 is 2′-OMe, n³ is 7, n⁴ is 0, B3 is 2′-OMe, n⁵ is 3, B1′ is 2′-OMe or 2′-F, q¹ is 9, T1′ is 2′-F, q² is 1, B2′ is 2′-OMe or 2′-F, q³ is 4, T2′ is 2′-F, q⁴ is 2, B3′ is 2′-OMe or 2′-F, q⁵ is 5, T3′ is 2′-F, q⁶ is 1, B4′ is 2′-OMe, and q⁷ is 1; with two phosphorothioate internucleotide linkage modifications within position 1-5 of the sense strand (counting from the 5′-end of the sense strand), and two phosphorothioate internucleotide linkage modifications at positions 1 and 2 and two phosphorothioate internucleotide linkage modifications within positions 18-23 of the antisense strand (counting from the 5′-end of the antisense strand). The dsRNA agent also comprises a 5′-PS₂ and a targeting ligand. In one embodiment, the 5′-PS₂ is at the 5′-end of the antisense strand, and the targeting ligand is at the 3′-end of the sense strand.

[0475] In one embodiment, B1 is 2′-OMe or 2′-F, n¹ is 8, T1 is 2′F, n² is 3, B2 is 2′-OMe, n³ is 7, n⁴ is 0, B3 is 2′-OMe, n⁵ is 3, B1′ is 2′-OMe or 2′-F, q¹ is 9, T1′ is 2′-F, q² is 1, B2′ is 2′-OMe or 2′-F, q³ is 4, T2′ is 2′-F, q⁴ is 2, B3′ is 2′-OMe or 2′-F, q⁵ is 5, T3′ is 2′-F, q⁶ is 1, B4′ is 2′-OMe, and q⁷ is 1; with two phosphorothioate internucleotide linkage modifications within position 1-5 of the sense strand (counting from the 5′-end of the sense strand), and two phosphorothioate internucleotide linkage modifications at positions 1 and 2 and two phosphorothioate internucleotide linkage modifications within positions 18-23 of the antisense strand (counting from the 5′-end of the antisense strand). The dsRNA agent also comprises a 5′-deoxy-5′-C-malonyl and a targeting ligand. In one embodiment, the 5′-deoxy-5′-C-malonyl is at the 5′-end of the antisense strand, and the targeting ligand is at the 3′-end of the sense strand.

[0476] In one embodiment, B1 is 2′-OMe or 2′-F, n¹ is 8, T1 is 2′F, n² is 3, B2 is 2′-OMe, n³ is 7, n⁴ is 0, B3 is 2′-OMe, n⁵ is 3, B1′ is 2′-OMe or 2′-F, q¹ is 9, T1′ is 2′-F, q² is 1, B2′ is 2′-OMe or 2′-F, q³ is 4, q⁴ is 0, B3′ is 2′-OMe or 2′-F, q⁵ is 7, T3′ is 2′-F, q⁶ is 1, B4′ is 2′-OMe, and q⁷ is 1; with two phosphorothioate internucleotide linkage modifications within position 1-5 of the sense strand (counting from the 5′-end), and two phosphorothioate internucleotide linkage modifications at positions 1 and 2 and two phosphorothioate internucleotide linkage modifications within positions 18-23 of the antisense strand (counting from the 5′-end). The dsRNA agent also comprises a 5′-P and a targeting ligand. In one embodiment, the 5′-P is at the 5′-end of the antisense strand, and the targeting ligand is at the 3′-end of the sense strand.

[0477] In one embodiment, B1 is 2′-OMe or 2′-F, n¹ is 8, T1 is 2′F, n² is 3, B2 is 2′-OMe, n³ is 7, n⁴ is 0, B3 is 2′-OMe, n⁵ is 3, B1′ is 2′-OMe or 2′-F, q¹ is 9, T1′ is 2′-F, q² is 1, B2′ is 2′-OMe or 2′-F, q³ is 4, q⁴ is 0, B3′ is 2′-OMe or 2′-F, q⁵ is 7, T3′ is 2′-F, q⁶ is 1, B4′ is 2′-OMe, and q⁷ is 1; with two phosphorothioate internucleotide linkage modifications within position 1-5 of the sense strand (counting from the 5′-end), and two phosphorothioate internucleotide linkage modifications at positions 1 and 2 and two phosphorothioate internucleotide linkage modifications within positions 18-23 of the antisense strand (counting from the 5′-end). The dsRNA agent also comprises a 5′-PS and a targeting ligand. In one embodiment, the 5′-PS is at the 5′-end of the antisense strand, and the targeting ligand is at the 3′-end of the sense strand.

[0478] In one embodiment, B1 is 2′-OMe or 2′-F, n¹ is 8, T1 is 2′F, n² is 3, B2 is 2′-OMe, n³ is 7, n⁴ is 0, B3 is 2′-OMe, n⁵ is 3, B1′ is 2′-OMe or 2′-F, q¹ is 9, T1′ is 2′-F, q² is 1, B2′ is 2′-OMe or 2′-F, q³ is 4, q⁴ is 0, B3′ is 2′-OMe or 2′-F, q⁵ is 7, T3′ is 2′-F, q⁶ is 1, B4′ is 2′-OMe, and q⁷ is 1; with two phosphorothioate internucleotide linkage modifications within position 1-5 of the sense strand (counting from the 5′-end), and two phosphorothioate internucleotide linkage modifications at positions 1 and 2 and two phosphorothioate internucleotide linkage modifications within positions 18-23 of the antisense strand (counting from the 5′-end). The dsRNA agent also comprises a 5′-VP (e.g., a 5′-E-VP, 5′-Z-VP, or combination thereof) and a targeting ligand. In one embodiment, the 5′-VP is at the 5′-end of the antisense strand, and the targeting ligand is at the 3′-end of the sense strand.

[0479] In one embodiment, B1 is 2′-OMe or 2′-F, n¹ is 8, T1 is 2′F, n² is 3, B2 is 2′-OMe, n³ is 7, n⁴ is 0, B3 is 2′-OMe, n⁵ is 3, B1′ is 2′-OMe or 2′-F, q¹ is 9, T1′ is 2′-F, q² is 1, B2′ is 2′-OMe or 2′-F, q³ is 4, q⁴ is 0, B3′ is 2′-OMe or 2′-F, q⁵ is 7, T3′ is 2′-F, q⁶ is 1, B4′ is 2′-OMe, and q⁷ is 1; with two phosphorothioate internucleotide linkage modifications within position 1-5 of the sense strand (counting from the 5′-end), and two phosphorothioate internucleotide linkage modifications at positions 1 and 2 and two phosphorothioate internucleotide linkage modifications within positions 18-23 of the antisense strand (counting from the 5′-end). The dsRNA agent also comprises a 5′-PS₂ and a targeting ligand. In one embodiment, the 5′-PS₂ is at the 5′-end of the antisense strand, and the targeting ligand is at the 3′-end of the sense strand.

[0480] In one embodiment, B1 is 2′-OMe or 2′-F, n¹ is 8, T1 is 2′F, n² is 3, B2 is 2′-OMe, n³ is 7, n⁴ is 0, B3 is 2′-OMe, n⁵ is 3, B1′ is 2′-OMe or 2′-F, q¹ is 9, T1′ is 2′-F, q² is 1, B2′ is 2′-OMe or 2′-F, q³ is 4, q⁴ is 0, B3′ is 2′-OMe or 2′-F, q⁵ is 7, T3′ is 2′-F, q⁶ is 1, B4′ is 2′-OMe, and q⁷ is 1; with two phosphorothioate internucleotide linkage modifications within position 1-5 of the sense strand (counting from the 5′-end), and two phosphorothioate internucleotide linkage modifications at positions 1 and 2 and two phosphorothioate internucleotide linkage modifications within positions 18-23 of the antisense strand (counting from the 5′-end). The dsRNA agent also comprises a 5′-deoxy-5′-C-malonyl and a targeting ligand. In one embodiment, the 5′-deoxy-5′-C-malonyl is at the 5′-end of the antisense strand, and the targeting ligand is at the 3′-end of the sense strand.

[0481] In one embodiment, B1 is 2′-OMe or 2′-F, n¹ is 8, T1 is 2′F, n² is 3, B2 is 2′-OMe, n³ is 7, n⁴ is 0, B3 is 2′-OMe, n⁵ is 3, B1′ is 2′-OMe or 2′-F, q¹ is 9, T1′ is 2′-F, q² is 1, B2′ is 2′-OMe or 2′-F, q³ is 4, T2′ is 2′-F, q⁴ is 2, B3′ is 2′-OMe or 2′-F, q⁵ is 5, T3′ is 2′-F, q⁶ is 1, B4′ is 2′-F, and q⁷ is 1; with two phosphorothioate internucleotide linkage modifications within position 1-5 of the sense strand (counting from the 5′-end of the sense strand), and two phosphorothioate internucleotide linkage modifications at positions 1 and 2 and two phosphorothioate internucleotide linkage modifications within positions 18-23 of the antisense strand (counting from the 5′-end of the antisense strand). The dsRNA agent also comprises a 5′-P and a targeting ligand. In one embodiment, the 5′-P is at the 5′-end of the antisense strand, and the targeting ligand is at the 3′-end of the sense strand.

[0482] In one embodiment, B1 is 2′-OMe or 2′-F, n¹ is 8, T1 is 2′F, n² is 3, B2 is 2′-OMe, n³ is 7, n⁴ is 0, B3 is 2′-OMe, n⁵ is 3, B1′ is 2′-OMe or 2′-F, q¹ is 9, T1′ is 2′-F, q² is 1, B2′ is 2′-OMe or 2′-F, q³ is 4, T2′ is 2′-F, q⁴ is 2, B3′ is 2′-OMe or 2′-F, q⁵ is 5, T3′ is 2′-F, q⁶ is 1, B4′ is 2′-F, and q⁷ is 1; with two phosphorothioate internucleotide linkage modifications within position 1-5 of the sense strand (counting from the 5′-end of the sense strand), and two phosphorothioate internucleotide linkage modifications at positions 1 and 2 and two phosphorothioate internucleotide linkage modifications within positions 18-23 of the antisense strand (counting from the 5′-end of the antisense strand). The dsRNA agent also comprises a 5′-PS and a targeting ligand. In one embodiment, the 5′-PS is at the 5′-end of the antisense strand, and the targeting ligand is at the 3′-end of the sense strand.

[0483] In one embodiment, B1 is 2′-OMe or 2′-F, n¹ is 8, T1 is 2′F, n² is 3, B2 is 2′-OMe, n³ is 7, n⁴ is 0, B3 is 2′-OMe, n⁵ is 3, B1′ is 2′-OMe or 2′-F, q¹ is 9, T1′ is 2′-F, q² is 1, B2′ is 2′-OMe or 2′-F, q³ is 4, T2′ is 2′-F, q⁴ is 2, B3′ is 2′-OMe or 2′-F, q⁵ is 5, T3′ is 2′-F, q⁶ is 1, B4′ is 2′-F, and q⁷ is 1; with two phosphorothioate internucleotide linkage modifications within position 1-5 of the sense strand (counting from the 5′-end of the sense strand), and two phosphorothioate internucleotide linkage modifications at positions 1 and 2 and two phosphorothioate internucleotide linkage modifications within positions 18-23 of the antisense strand (counting from the 5′-end of the antisense strand). The dsRNA agent also comprises a 5′-VP (e.g., a 5′-E-VP, 5′-Z-VP, or combination thereof) and a targeting ligand. In one embodiment, the 5′-VP is at the 5′-end of the antisense strand, and the targeting ligand is at the 3′-end of the sense strand.

[0484] In one embodiment, B1 is 2′-OMe or 2′-F, n¹ is 8, T1 is 2′F, n² is 3, B2 is 2′-OMe, n³ is 7, n⁴ is 0, B3 is 2′-OMe, n⁵ is 3, B1′ is 2′-OMe or 2′-F, q¹ is 9, T1′ is 2′-F, q² is 1, B2′ is 2′-OMe or 2′-F, q³ is 4, T2′ is 2′-F, q⁴ is 2, B3′ is 2′-OMe or 2′-F, q⁵ is 5, T3′ is 2′-F, q⁶ is 1, B4′ is 2′-F, and q⁷ is 1; with two phosphorothioate internucleotide linkage modifications within position 1-5 of the sense strand (counting from the 5′-end of the sense strand), and two phosphorothioate internucleotide linkage modifications at positions 1 and 2 and two phosphorothioate internucleotide linkage modifications within positions 18-23 of the antisense strand (counting from the 5′-end of the antisense strand). The dsRNA agent also comprises a 5′-PS₂ and a targeting ligand. In one embodiment, the 5′-PS₂ is at the 5′-end of the antisense strand, and the targeting ligand is at the 3′-end of the sense strand.

[0485] In one embodiment, B1 is 2′-OMe or 2′-F, n¹ is 8, T1 is 2′F, n² is 3, B2 is 2′-OMe, n³ is 7, n⁴ is 0, B3 is 2′-OMe, n⁵ is 3, B1′ is 2′-OMe or 2′-F, q¹ is 9, T1′ is 2′-F, q² is 1, B2′ is 2′-OMe or 2′-F, q³ is 4, T2′ is 2′-F, q⁴ is 2, B3′ is 2′-OMe or 2′-F, q⁵ is 5, T3′ is 2′-F, q⁶ is 1, B4′ is 2′-F, and q⁷ is 1; with two phosphorothioate internucleotide linkage modifications within position 1-5 of the sense strand (counting from the 5′-end of the sense strand), and two phosphorothioate internucleotide linkage modifications at positions 1 and 2 and two phosphorothioate internucleotide linkage modifications within positions 18-23 of the antisense strand (counting from the 5′-end of the antisense strand). The dsRNA agent also comprises a 5′-deoxy-5′-C-malonyl and a targeting ligand. In one embodiment, the 5′-deoxy-5′-C-malonyl is at the 5′-end of the antisense strand, and the targeting ligand is at the 3′-end of the sense strand.

[0486] In one embodiment, B1 is 2′-OMe or 2′-F, n¹ is 8, T1 is 2′F, n² is 3, B2 is 2′-OMe, n³ is 7, n⁴ is 0, B3 is 2′-OMe, n⁵ is 3, B1′ is 2′-OMe or 2′-F, q¹ is 9, T1′ is 2′-F, q² is 1, B2′ is 2′-OMe or 2′-F, q³ is 4, q⁴ is 0, B3′ is 2′-OMe or 2′-F, q⁵ is 7, T3′ is 2′-F, q⁶ is 1, B4′ is 2′-F, and q⁷ is 1; with two phosphorothioate internucleotide linkage modifications within position 1-5 of the sense strand (counting from the 5′-end of the sense strand), and two phosphorothioate internucleotide linkage modifications at positions 1 and 2 and two phosphorothioate internucleotide linkage modifications within positions 18-23 of the antisense strand (counting from the 5′-end of the antisense strand). The dsRNA agent also comprises a 5′-P and a targeting ligand. In one embodiment, the 5′-P is at the 5′-end of the antisense strand, and the targeting ligand is at the 3′-end of the sense strand.

[0487] In one embodiment, B1 is 2′-OMe or 2′-F, n¹ is 8, T1 is 2′F, n² is 3, B2 is 2′-OMe, n³ is 7, n⁴ is 0, B3 is 2′-OMe, n⁵ is 3, B1′ is 2′-OMe or 2′-F, q¹ is 9, T1′ is 2′-F, q² is 1, B2′ is 2′-OMe or 2′-F, q³ is 4, q⁴ is 0, B3′ is 2′-OMe or 2′-F, q⁵ is 7, T3′ is 2′-F, q⁶ is 1, B4′ is 2′-F, and q⁷ is 1; with two phosphorothioate internucleotide linkage modifications within position 1-5 of the sense strand (counting from the 5′-end of the sense strand), and two phosphorothioate internucleotide linkage modifications at positions 1 and 2 and two phosphorothioate internucleotide linkage modifications within positions 18-23 of the antisense strand (counting from the 5′-end of the antisense strand). The dsRNA agent also comprises a 5′-PS and a targeting ligand. In one embodiment, the 5′-PS is at the 5′-end of the antisense strand, and the targeting ligand is at the 3′-end of the sense strand.

[0488] In one embodiment, B1 is 2′-OMe or 2′-F, n¹ is 8, T1 is 2′F, n² is 3, B2 is 2′-OMe, n³ is 7, n⁴ is 0, B3 is 2′-OMe, n⁵ is 3, B1′ is 2′-OMe or 2′-F, q¹ is 9, T1′ is 2′-F, q² is 1, B2′ is 2′-OMe or 2′-F, q³ is 4, q⁴ is 0, B3′ is 2′-OMe or 2′-F, q⁵ is 7, T3′ is 2′-F, q⁶ is 1, B4′ is 2′-F, and q⁷ is 1; with two phosphorothioate internucleotide linkage modifications within position 1-5 of the sense strand (counting from the 5′-end of the sense strand), and two phosphorothioate internucleotide linkage modifications at positions 1 and 2 and two phosphorothioate internucleotide linkage modifications within positions 18-23 of the antisense strand (counting from the 5′-end of the antisense strand). The dsRNA agent also comprises a 5′-VP (e.g., a 5′-E-VP, 5′-Z-VP, or combination thereof) and a targeting ligand. In one embodiment, the 5′-VP is at the 5′-end of the antisense strand, and the targeting ligand is at the 3′-end of the sense strand.

[0489] In one embodiment, B1 is 2′-OMe or 2′-F, n¹ is 8, T1 is 2′F, n² is 3, B2 is 2′-OMe, n³ is 7, n⁴ is 0, B3 is 2′-OMe, n⁵ is 3, B1′ is 2′-OMe or 2′-F, q¹ is 9, T1′ is 2′-F, q² is 1, B2′ is 2′-OMe or 2′-F, q³ is 4, q⁴ is 0, B3′ is 2′-OMe or 2′-F, q⁵ is 7, T3′ is 2′-F, q⁶ is 1, B4′ is 2′-F, and q⁷ is 1; with two phosphorothioate internucleotide linkage modifications within position 1-5 of the sense strand (counting from the 5′-end of the sense strand), and two phosphorothioate internucleotide linkage modifications at positions 1 and 2 and two phosphorothioate internucleotide linkage modifications within positions 18-23 of the antisense strand (counting from the 5′-end of the antisense strand). The dsRNA agent also comprises a 5′-PS₂ and a targeting ligand. In one embodiment, the 5′-PS₂ is at the 5′-end of the antisense strand, and the targeting ligand is at the 3′-end of the sense strand.

[0490] In one embodiment, B1 is 2′-OMe or 2′-F, n¹ is 8, T1 is 2′F, n² is 3, B2 is 2′-OMe, n³ is 7, n⁴ is 0, B3 is 2′-OMe, n⁵ is 3, B1′ is 2′-OMe or 2′-F, q¹ is 9, T1′ is 2′-F, q² is 1, B2′ is 2′-OMe or 2′-F, q³ is 4, q⁴ is 0, B3′ is 2′-OMe or 2′-F, q⁵ is 7, T3′ is 2′-F, q⁶ is 1, B4′ is 2′-F, and q⁷ is 1; with two phosphorothioate internucleotide linkage modifications within position 1-5 of the sense strand (counting from the 5′-end of the sense strand), and two phosphorothioate internucleotide linkage modifications at positions 1 and 2 and two phosphorothioate internucleotide linkage modifications within positions 18-23 of the antisense strand (counting from the 5′-end of the antisense strand). The dsRNA agent also comprises a 5′-deoxy-5′-C-malonyl and a targeting ligand. In one embodiment, the 5′-deoxy-5′-C-malonyl is at the 5′-end of the antisense strand, and the targeting ligand is at the 3′-end of the sense strand.

[0491] In a particular embodiment, the dsRNA agents of the present invention comprise:
[0492] (a) a sense strand having:
   [0493] (i) a length of 21 nucleotides;
   [0494] (ii) optionally an ASGPR ligand attached to the 3′-end, wherein said ASGPR ligand comprises three GalNAc derivatives attached through a trivalent branched linker; and
   [0495] (iii) 2′-F modifications at positions 1, 3, 5, 7, 9 to 11, 13, 17, 19, and 21, and 2′-OMe modifications at positions 2, 4, 6, 8, 12, 14 to 16, 18, and 20 (counting from the 5′ end);
   [0496] and
[0497] (b) an antisense strand having:
   [0498] (i) a length of 23 nucleotides;
   [0499] (ii) 2′-OMe modifications at positions 1, 3, 5, 9, 11 to 13, 15, 17, 19, 21, and 23, and 2′F modifications at positions 2, 4, 6 to 8, 10, 14, 16, 18, 20, and 22 (counting from the 5′ end); and
   [0500] (iii) phosphorothioate internucleotide linkages between nucleotide positions 21 and 22, and between nucleotide positions 22 and 23 (counting from the 5′ end);
   [0501] wherein the dsRNA agents have a two nucleotide overhang at the 3′-end of the antisense strand, and a blunt end at the 5′-end of the antisense strand.

[0502] In another particular embodiment, the dsRNA agents comprise:
[0503] (a) a sense strand having:
   [0504] (i) a length of 21 nucleotides;
   [0505] (ii) optionally an ASGPR ligand attached to the 3′-end, wherein said ASGPR ligand comprises three GalNAc derivatives attached through a trivalent branched linker;
   [0506] (iii) 2′-F modifications at positions 1, 3, 5, 7, 9 to 11, 13, 15, 17, 19, and 21, and 2′-OMe modifications at positions 2, 4, 6, 8, 12, 14, 16, 18, and 20 (counting from the 5′ end); and
   [0507] (iv) phosphorothioate internucleotide linkages between nucleotide positions 1 and 2, and between nucleotide positions 2 and 3 (counting from the 5′ end);
   [0508] and
[0509] (b) an antisense strand having:
   [0510] (i) a length of 23 nucleotides;
   [0511] (ii) 2′-OMe modifications at positions 1, 3, 5, 7, 9, 11 to 13, 15, 17, 19, and 21 to 23, and 2′F modifications at positions 2, 4, 6, 8, 10, 14, 16, 18, and 20 (counting from the 5′ end); and
   [0512] (iii) phosphorothioate internucleotide linkages between nucleotide positions 1 and 2, between nucleotide positions 2 and 3, between nucleotide positions 21 and 22, and between nucleotide positions 22 and 23 (counting from the 5′ end);
[0513] wherein the dsRNA agents have a two nucleotide overhang at the 3′-end of the antisense strand, and a blunt end at the 5′-end of the antisense strand.

[0514] In another particular embodiment, the dsRNA agents comprise:
[0515] (a) a sense strand having:
   [0516] (i) a length of 21 nucleotides;
   [0517] (ii) optionally an ASGPR ligand attached to the 3′-end, wherein said ASGPR ligand comprises three GalNAc derivatives attached through a trivalent branched linker;
   [0518] (iii) 2′-OMe modifications at positions 1 to 6, 8, 10, and 12 to 21, 2′-F modifications at positions 7, and 9, and a desoxy-nucleotide (e.g. dT) at position 11 (counting from the 5′ end); and
   [0519] (iv) phosphorothioate internucleotide linkages between nucleotide positions 1 and 2, and between nucleotide positions 2 and 3 (counting from the 5′ end);
   [0520] and
[0521] (b) an antisense strand having:
   [0522] (i) a length of 23 nucleotides;
   [0523] (ii) 2′-OMe modifications at positions 1, 3, 7, 9, 11, 13, 15, 17, and 19 to 23, and 2′-F modifications at positions 2, 4 to 6, 8, 10, 12, 14, 16, and 18 (counting from the 5′ end); and
   [0524] (iii) phosphorothioate internucleotide linkages between nucleotide positions 1 and 2, between nucleotide positions 2 and 3, between nucleotide positions 21 and 22, and between nucleotide positions 22 and 23 (counting from the 5′ end);
[0525] wherein the dsRNA agents have a two nucleotide overhang at the 3′-end of the antisense strand, and a blunt end at the 5′-end of the antisense strand.

[0526] In another particular embodiment, the dsRNA agents comprise:
[0527] (a) a sense strand having:
   [0528] (i) a length of 21 nucleotides;
   [0529] (ii) optionally an ASGPR ligand attached to the 3′-end, wherein said ASGPR ligand comprises three GalNAc derivatives attached through a trivalent branched linker;
   [0530] (iii) 2′-OMe modifications at positions 1 to 6, 8, 10, 12, 14, and 16 to 21, and 2′-F modifications at positions 7, 9, 11, 13, and 15; and
   [0531] (iv) phosphorothioate internucleotide linkages between nucleotide positions 1 and 2, and between nucleotide positions 2 and 3 (counting from the 5′ end);
   [0532] and
[0533] (b) an antisense strand having:
   [0534] (i) a length of 23 nucleotides;
   [0535] (ii) 2′-OMe modifications at positions 1, 5, 7, 9, 11, 13, 15, 17, 19, and 21 to 23, and 2′-F modifications at positions 2 to 4, 6, 8, 10, 12, 14, 16, 18, and 20 (counting from the 5′ end); and
   [0536] (iii) phosphorothioate internucleotide linkages between nucleotide positions 1 and 2, between nucleotide positions 2 and 3, between nucleotide positions 21 and 22, and between nucleotide positions 22 and 23 (counting from the 5′ end);
[0537] wherein the dsRNA agents have a two nucleotide overhang at the 3′-end of the antisense strand, and a blunt end at the 5′-end of the antisense strand.

[0538] In another particular embodiment, the dsRNA agents comprise:
[0539] (a) a sense strand having:
   [0540] (i) a length of 21 nucleotides;
   [0541] (ii) optionally an ASGPR ligand attached to the 3′-end, wherein said ASGPR ligand comprises three GalNAc derivatives attached through a trivalent branched linker;
   [0542] (iii) 2′-OMe modifications at positions 1 to 9, and 12 to 21, and 2′-F modifications at positions 10, and 11; and
   [0543] (iv) phosphorothioate internucleotide linkages between nucleotide positions 1 and 2, and between nucleotide positions 2 and 3 (counting from the 5′ end);
   [0544] and
[0545] (b) an antisense strand having:
   [0546] (i) a length of 23 nucleotides;
   [0547] (ii) 2′-OMe modifications at positions 1, 3, 5, 7, 9, 11 to 13, 15, 17, 19, and 21 to 23, and 2′-F modifications at positions 2, 4, 6, 8, 10, 14, 16, 18, and 20 (counting from the 5′ end); and
   [0548] (iii) phosphorothioate internucleotide linkages between nucleotide positions 1 and 2, between nucleotide positions 2 and 3, between nucleotide positions 21 and 22, and between nucleotide positions 22 and 23 (counting from the 5′ end);
[0549] wherein the dsRNA agents have a two nucleotide overhang at the 3′-end of the antisense strand, and a blunt end at the 5′-end of the antisense strand.

[0550] In another particular embodiment, the dsRNA agents comprise:
[0551] (a) a sense strand having:
   [0552] (i) a length of 21 nucleotides;
   [0553] (ii) optionally an ASGPR ligand attached to the 3′-end, wherein said ASGPR ligand comprises three GalNAc derivatives attached through a trivalent branched linker;
   [0554] (iii) 2′-F modifications at positions 1, 3, 5, 7, 9 to 11, and 13, and 2′-OMe modifications at positions 2, 4, 6, 8, 12, and 14 to 21; and
   [0555] (iv) phosphorothioate internucleotide linkages between nucleotide positions 1 and 2, and between nucleotide positions 2 and 3 (counting from the 5′ end);
   [0556] and
[0557] (b) an antisense strand having:
   [0558] (i) a length of 23 nucleotides;
   [0559] (ii) 2′-OMe modifications at positions 1, 3, 5 to 7, 9, 11 to 13, 15, 17 to 19, and 21 to 23, and 2′-F modifications at positions 2, 4, 8, 10, 14, 16, and 20 (counting from the 5′ end); and
   [0560] (iii) phosphorothioate internucleotide linkages between nucleotide positions 1 and 2, between nucleotide positions 2 and 3, between nucleotide positions 21 and 22, and between nucleotide positions 22 and 23 (counting from the 5′ end);
[0561] wherein the dsRNA agents have a two nucleotide overhang at the 3′-end of the antisense strand, and a blunt end at the 5′-end of the antisense strand.

[0562] In another particular embodiment, the dsRNA agents comprise:
[0563] (a) a sense strand having:
   [0564] (i) a length of 21 nucleotides;
   [0565] (ii) optionally an ASGPR ligand attached to the 3′-end, wherein said ASGPR ligand comprises three GalNAc derivatives attached through a trivalent branched linker;
   [0566] (iii) 2′-OMe modifications at positions 1, 2, 4, 6, 8, 12, 14, 15, 17, and 19 to 21, and 2′-F modifications at positions 3, 5, 7, 9 to 11, 13, 16, and 18; and (iv) phosphorothioate internucleotide linkages between nucleotide positions 1 and 2, and between nucleotide positions 2 and 3 (counting from the 5′ end);
   [0567] and
[0568] (b) an antisense strand having:
   [0569] (i) a length of 25 nucleotides;
   [0570] (ii) 2′-OMe modifications at positions 1, 4, 6, 7, 9, 11 to 13, 15, 17, and 19 to 23, 2′-F modifications at positions 2, 3, 5, 8, 10, 14, 16, and 18, and desoxy-nucleotides (e.g. dT) at positions 24 and 25 (counting from the 5′ end); and
   [0571] (iii) phosphorothioate internucleotide linkages between nucleotide positions 1 and 2, between nucleotide positions 2 and 3, between nucleotide positions 21 and 22, and between nucleotide positions 22 and 23 (counting from the 5′ end);
[0572] wherein the dsRNA agents have a four nucleotide overhang at the 3′-end of the antisense strand, and a blunt end at the 5′-end of the antisense strand.

[0573] In another particular embodiment, the dsRNA agents comprise:
[0574] (a) a sense strand having:
   [0575] (i) a length of 21 nucleotides;
   [0576] (ii) optionally an ASGPR ligand attached to the 3′-end, wherein said ASGPR ligand comprises three GalNAc derivatives attached through a trivalent branched linker;
   [0577] (iii) 2′-OMe modifications at positions 1 to 6, 8, and 12 to 21, and 2′-F modifications at positions 7, and 9 to 11; and
   [0578] (iv) phosphorothioate internucleotide linkages between nucleotide positions 1 and 2, and between nucleotide positions 2 and 3 (counting from the 5′ end);
   [0579] and
[0580] (b) an antisense strand having:
   [0581] (i) a length of 23 nucleotides;
   [0582] (ii) 2′-OMe modifications at positions 1, 3 to 5, 7, 8, 10 to 13, 15, and 17 to 23, and 2′-F modifications at positions 2, 6, 9, 14, and 16 (counting from the 5′ end); and
   [0583] (iii) phosphorothioate internucleotide linkages between nucleotide positions 1 and 2, between nucleotide positions 2 and 3, between nucleotide positions 21 and 22, and between nucleotide positions 22 and 23 (counting from the 5′ end);
[0584] wherein the dsRNA agents have a two nucleotide overhang at the 3′-end of the antisense strand, and a blunt end at the 5′-end of the antisense strand.

[0585] In another particular embodiment, the dsRNA agents comprise:
[0586] (a) a sense strand having:
   [0587] (i) a length of 21 nucleotides;
   [0588] (ii) optionally an ASGPR ligand attached to the 3′-end, wherein said ASGPR ligand comprises three GalNAc derivatives attached through a trivalent branched linker;
   [0589] (iii) 2′-OMe modifications at positions 1 to 6, 8, and 12 to 21, and 2′-F modifications at positions 7, and 9 to 11; and
   [0590] (iv) phosphorothioate internucleotide linkages between nucleotide positions 1 and 2, and between nucleotide positions 2 and 3 (counting from the 5′ end);
   [0591] and
[0592] (b) an antisense strand having:
   [0593] (i) a length of 23 nucleotides;
   [0594] (ii) 2′-OMe modifications at positions 1, 3 to 5, 7, 10 to 13, 15, and 17 to 23, and 2′-F modifications at positions 2, 6, 8, 9, 14, and 16 (counting from the 5′ end); and
   [0595] (iii) phosphorothioate internucleotide linkages between nucleotide positions 1 and 2, between nucleotide positions 2 and 3, between nucleotide positions 21 and 22, and between nucleotide positions 22 and 23 (counting from the 5′ end);
[0596] wherein the dsRNA agents have a two nucleotide overhang at the 3′-end of the antisense strand, and a blunt end at the 5′-end of the antisense strand.

[0597] In another particular embodiment, the dsRNA agents comprise:
[0598] (a) a sense strand having:
   [0599] (i) a length of 19 nucleotides;
   [0600] (ii) optionally an ASGPR ligand attached to the 3′-end, wherein said ASGPR ligand comprises three GalNAc derivatives attached through a trivalent branched linker;
   [0601] (iii) 2′-OMe modifications at positions 1 to 4, 6, and 10 to 19, and 2′-F modifications at positions 5, and 7 to 9; and
   [0602] (iv) phosphorothioate internucleotide linkages between nucleotide positions 1 and 2, and between nucleotide positions 2 and 3 (counting from the 5′ end); and
   [0603] (b) an antisense strand having:
   [0604] (i) a length of 21 nucleotides;
   [0605] (ii) 2′-OMe modifications at positions 1, 3 to 5, 7, 10 to 13, 15, and 17 to 21, and 2′-F modifications at positions 2, 6, 8, 9, 14, and 16 (counting from the 5′ end); and
   [0606] (iii) phosphorothioate internucleotide linkages between nucleotide positions 1 and 2, between nucleotide positions 2 and 3, between nucleotide positions 19 and 20, and between nucleotide positions 20 and 21 (counting from the 5′ end);
[0607] wherein the dsRNA agents have a two nucleotide overhang at the 3′-end of the antisense strand, and a blunt end at the 5′-end of the antisense strand.

[0608] In one embodiment, the dsRNA agents comprise:
[0609] (a) a sense strand having:
   [0610] (i) a length of 18-23 nucleotides;
   [0611] (ii) three consecutive 2′-F modifications at positions 7-15; and
[0612] (b) an antisense strand having:
   [0613] (i) a length of 18-23 nucleotides;
   [0614] (ii) at least 2′-F modifications anywhere on the strand; and
   [0615] (iii) at least two phosphorothioate internucleotide linkages at the first five nucleotides (counting from the 5′ end);
[0616] wherein the dsRNA agents have one or more lipophilic moieties conjugated to one or more positions on at least one strand; and either have two nucleotides overhang at the 3′-end of the antisense strand, and a blunt end at the 5′-end of the antisense strand; or blunt end both ends of the duplex.

[0617] In one embodiment, the dsRNA agents comprise:
[0618] (a) a sense strand having:
   [0619] (i) a length of 18-23 nucleotides;
   [0620] (ii) less than four 2′-F modifications;
[0621] (b) an antisense strand having:
   [0622] (i) a length of 18-23 nucleotides;
   [0623] (ii) at less than twelve 2′-F modification; and
   [0624] (iii) at least two phosphorothioate internucleotide linkages at the first five nucleotides (counting from the 5′ end);
[0625] wherein the dsRNA agents have one or more lipophilic moieties conjugated to one or more positions on at least one strand; and either have two nucleotides overhang at the 3′-end of the antisense strand, and a blunt end at the 5′-end of the antisense strand; or blunt end both ends of the duplex.

[0626] In one embodiment, the dsRNA agents comprise:
[0627] (a) a sense strand having:
   [0628] (i) a length of 19-35 nucleotides;
   [0629] (ii) less than four 2′-F modifications;
[0630] (b) an antisense strand having:
   [0631] (i) a length of 19-35 nucleotides;
   [0632] (ii) at less than twelve 2′-F modification; and
   [0633] (iii) at least two phosphorothioate internucleotide linkages at the first five nucleotides (counting from the 5′ end);
[0634] wherein the duplex region is between 19 to 25 base pairs (preferably 19, 20, 21 or 22); and wherein the dsRNA agents have one or more lipophilic moieties conjugated to one or more positions on at least one strand; and either have two nucleotides overhang at the 3′-end of the antisense strand, and a blunt end at the 5′-end of the antisense strand; or blunt end both ends of the duplex.

[0635] In one embodiment, the dsRNA agents comprise a sense strand and antisense strands having a length of 15-30 nucleotides; at least two phosphorothioate internucleotide linkages at the first five nucleotides on the antisense strand (counting from the 5′ end); wherein the duplex region is between 19 to 25 base pairs (preferably 19, 20, 21 or 22); wherein the dsRNA agents have one or more lipophilic moieties conjugated to one or more positions on at least one strand; and wherein the dsRNA agents have less than 20%, less than 15% and less than 10% non-natural nucleotide.

[0636] Examples of non-natural nucleotide includes acyclic nucleotides, LNA, HNA, CeNA, 2′-methoxyethyl, 2′-O-allyl, 2′-C-allyl, 2′-deoxy, 2′-fluoro, 2′-O—N-methylacetamido (2′-O—NMA), a 2′-O-dimethylaminoethoxyethyl (2′-O-DMAEOE), 2′-O-aminopropyl (2′-O-AP), or 2′-ara-F, and others.

[0637] In one embodiment, the dsRNA agents comprise a sense strand and antisense strands having a length of 15-30 nucleotides; at least two phosphorothioate internucleotide linkages at the first five nucleotides on the antisense strand (counting from the 5′ end); wherein the duplex region is between 19 to 25 base pairs (preferably 19, 20, 21 or 22); wherein the dsRNA agents have one or more lipophilic moieties conjugated to one or more positions on at least one strand; and wherein the dsRNA agents have greater than 80%, greater than 85% and greater than 90% natural nucleotide, such as 2′-OH, 2′-deoxy and 2′-OMe are natural nucleotides.

[0638] In one embodiment, the dsRNA agents comprise a sense strand and antisense strands having a length of 15-30 nucleotides; at least two phosphorothioate internucleotide linkages at the first five nucleotides on the antisense strand (counting from the 5′ end); wherein the duplex region is between 19 to 25 base pairs (preferably 19, 20, 21 or 22); wherein the dsRNA agents have one or more lipophilic moieties conjugated to one or more positions on at least one strand; and wherein the dsRNA agents have 100% natural nucleotide, such as 2′-OH, 2′-deoxy and 2′-OMe are natural nucleotides.

[0639] Examples of lipophilic moieties include, but not limited to, lipid (a saturated or unsaturated C4-C30 hydrocarbon chain, and an optional functional group selected from the group consisting of hydroxyl, amine, carboxylic acid, sulfonate, phosphate, thiol, azide, and alkyne), cholesterol, retinoic acid, cholic acid, adamantane acetic acid, 1-pyrene butyric acid, dihydrotestosterone, 1,3-bis-O(hexadecyl)glycerol, geranyloxyhexyanol, hexadecylglycerol, borneol, menthol, 1,3-propanediol, heptadecyl group, palmitic acid, myristic acid, O3-(oleoyl)lithocholic acid, O3-(oleoyl)cholenic acid, dimethoxytrityl, or phenoxazine.

[0640] In some embodiments, the lipophilic moiety is a C₆-C₃₀ acid (e.g., hexanoic acid, heptanoic acid, octanoic acid, nonanoic acid, decanoic acid, undecanoic acid, dodcanoic acid, tridecanoic acid, tetradecanoic acid, pentadecanoic acid, hexadecanoic acid, heptadecanoic acid, octadecanoic acid, oleic acid, linoleic acid, arachidonic acid, cis-4,7,10,13,16,19-docosahexanoic acid, vitamin A, vitamin E, cholesterol etc.) or a C₆-C₃₀ alcohol (e.g., hexanol, heptanol, octanol, nonanol, decanol, undecanol, dodcanol, tridecanol, tetradecanol, pentadecanol, hexadecanol, heptadecanol, octadecanol, oleyl alcohol, linoleyl alcohol, arachidonic alcohol, cis-4,7,10,13,16,19-docosahexanol, retinol, vitamin E, cholesterol etc.).

[0641] In one example, the lipophilic moiety is a saturated or unsaturated C₄-C₁₈ hydrocarbon chain.

[0642] In one example, the lipohilic moiety is docosahexaenoic acid.

[0643] In some embodiments, the dsRNA agent comprises a sense strand and an antisense strand, each strand independently having a length of 15 to 35 nucleotides, wherein the sense strand comprises a 2′-fluoro nucleotide at position 10, counting from 5′-end of the sense strand.

[0644] In some embodiments, the sense strand further comprises one or more, e.g., 1, 2, 3, 4 or 5 additional 2′-fluoro nucleotides. The additional 2′-fluoro nucleotides can be located anywhere in the sense strand.

[0645] In some embodiments, the sense strand further comprises a 2′-fluoro nucleotide at position 8, 9, 11 or 12, counting from 5′-end of the sense strand. For example, the sense strand further comprises a 2′-fluoro nucleotide at position 9, counting from 5′-end of the sense strand. In other words, the sense strand comprises a 2′-fluoro nucleotide at positions 9 and 10, counting from 5′-end of the sense strand. In another example, the sense strand further comprises a 2′-fluoro nucleotide at position 11, counting from 5′-end of the sense strand. For example, the sense strand comprises a 2′-fluoro nucleotide at positions 10 and 11, counting from 5′-end of the sense strand.

[0646] In some embodiments, the sense strand comprises a 2′-fluoro nucleotide at positions 9, 10 and 11, counting from 5′-end of the sense strand. In some other embodiments, the sense strand comprises a 2′-fluoro nucleotide at positions 8, 9 and 10, counting from 5′-end of the sense strand. In yet some other embodiments, the sense strand comprises a 2′-fluoro nucleotide at positions 10, 11 and 12, counting from 5′-end of the sense strand.

[0647] In some embodiments, the sense strand further comprise a 2′-fluoro nucleotide at position 7.

[0648] In some embodiments, the sense strand does not comprise a 2′-fluoro nucleotide at position 7, counting from 5′-end of the sense strand. For example, the sense strand comprises a 2′-OMe nucleotide at position 7, counting from the 5′-end of the sense strand.

[0649] In some embodiments, any of the nucleotides in the sense strand that is not a 2′-fluoro nucleotide is a 2′-OMe nucleotide.

[0650] In some embodiments, the antisense strand comprises one or more 2′-deoxy, e.g., 2′-H nucleotides. For example, the antisense strand comprises 1, 2, 3, 4, 5, 6 or more 2′-deoxy nucleotides. In some embodiments, the antisense strand comprises 2, 3, 4, 5 or 6 2′-deoxy nucleotides. The 2′-deoxy nucleotides can be located anywhere in the antisense strand. For example, the antisense strand comprises a 2′-deoxy nucleotide at 1, 2, 3, 4, 5 or 6 of positions 2, 5, 7, 12, 14 and 16, counting from 5′-end of the antisense strand. In some embodiments, the antisense comprises a 2′-deoxy nucleotide at positions 2 and 12, counting from 5′-end of the antisense strand. In some embodiments, the antisense comprises a 2′-deoxy nucleotide at positions 5 and 7, counting from 5′-end of the antisense strand. In some embodiments, the antisense comprises a 2′-deoxy nucleotide at positions 2, 5, 7 and 12, counting from 5′-end of the antisense strand.

[0651] In some embodiments, the antisense strand comprises one or more, e.g., 1, 2, 3, 4, 5 or more of 2′-fluoro nucleotides. For example, the antisense strand comprises a 2′-fluoro nucleotide at position 14, counting from 5′-end of the antisense strand.

[0652] In some embodiments, the antisense strand comprises a 2′-fluoro nucleotide at position 14 and a nucleotide other than a 2′-deoxy or 2′-fluoro at position 16, counting from 5′-end of the antisense strand. For example, the antisense strand comprises a 2′-fluoro nucleotide at position 14 and a nucleotide other than a 2′-deoxy or 2′-fluoro at position 16, counting from 5′-end of the antisense strand.

[0653] In some embodiments, the antisense strand comprises a 2′-deoxy nucleotide at positions 2 and 12 and 2′-fluoro nucleotide at position 14, counting from 5′-end of the antisense strand. In some embodiments, the antisense strand comprises a 2′-deoxy nucleotide at positions 2 and 12, a 2′-fluoro nucleotide at position 14, and a nucleotide other than a 2′-deoxy or 2′-fluoro at position 16, counting from 5′-end of the antisense strand. For example, the antisense strand comprises a 2′-deoxy nucleotide at positions 2 and 12, a 2′-fluoro nucleotide at position 14, and a 2′-OMe nucleotide at position 16, counting from 5′-end of the antisense strand.

[0654] In some embodiments, the antisense strand comprises a 2′-deoxy nucleotide at position 14, counting from the 5′-end of the antisense stand, and the sense strand comprises a nucleotide other than a 2′-fluoro at position 7, counting from 5′-end of the sense strand. For example, the antisense strand comprises a 2′-deoxy nucleotide at positions 2, 12 and 14, counting from the 5′-end of the antisense stand, and the sense strand comprises a 2′-fluoro nucleotide at position 10 and a nucleotide other than a 2′-fluoro at position 7, counting from 5′-end of the sense strand.

[0655] In some embodiments, the sense strand comprises a 2′-fluoro nucleotide at position 10, counting from 5′-end of the sense strand, and the antisense strand comprises a 2′-deoxy nucleotide at positions 2, 5, 7 and 12, counting from 5′-end of the antisense strand, and
[0656] (i) the antisense strand comprises a 2′-fluoro nucleotide at position 14 and a nucleotide other than a 2′-deoxy or 2′-fluoro nucleotide at position 16, counting from the 5′-end of the antisense strand; or
[0657] (ii) the antisense strand comprises a 2′-deoxy nucleotide at position 14 or 16, counting from the 5′-end of the antisense strand, and the sense strand comprises a nucleotide other than a 2′-fluoro nucleotide at position 7, counting from the 5′-end of the sense strand.

[0658] In some embodiments, any of the nucleotides in the antisense strand that is not a 2′-fluoro nucleotide or not a 2′-deoxy nucleotide is a 2′-OMe nucleotide.

[0659] In some embodiments, the dsRNA agent comprises a sense strand and an antisense strand, each strand having 14 to 30 nucleotides, wherein the sense strand sequence is represented by formula (I):

[chemical structure]

[0660] wherein:
[0661] i and j are each independently 0 or 1;
[0662] p and q are each independently 0-6;
[0663] each Nₐ independently represents an oligonucleotide sequence comprising 0-25 modified nucleotides, each sequence comprising at least two differently modified nucleotides;
[0664] each N_{b} independently represents an oligonucleotide sequence comprising 1, 2, 3, 4, 5, or 6 modified nucleotides;
[0665] each nₚ and n_{q} independently represent an overhang nucleotide;
[0666] wherein N_{b} and Y do not have the same modification;
[0667] wherein XXX, YYY and ZZZ each independently represent one motif of three identical modifications on three consecutive nucleotides;
[0668] wherein wherein the dsRNA agents have one or more lipophilic moieties conjugated to one or more positions on at least one strand; and
[0669] wherein the antisense strand of the dsRNA comprises two blocks of one, two pr three phosphorothioate internucleotide linkages separated by 1, 2, 3, 4, 5, 6, 7, 8, 9, 10, 11, 12, 13, 14, 15, 16, 17, or 18 phosphate internucleotide linkages.

[0670] In some embodiments, the dsRNA agent comprises an antisense strand sequence represented by formula (II):

[chemical structure]

[0671] wherein:
[0672] k and l are each independently 0 or 1;
[0673] p and q are each independently 0-6;
[0674] each Nₐ′ independently represents an oligonucleotide sequence comprising 0-25 modified nucleotides, each sequence comprising at least two differently modified nucleotides;
[0675] each N_{b}′ independently represents an oligonucleotide sequence comprising 0-10 modified nucleotides;
[0676] each nₚ′ and n_{q}′ independently represent an overhang nucleotide comprising 0-6 nucleotides;
[0677] wherein N_{b}′ and Y′ do not have the same modification; and
[0678] X′X′X′, Y′Y′Y′ and Z′Z′Z′ each independently represent one motif of three identical modifications on three consecutive nucleotides.

[0679] Additional details about the motifs represented by formula (I) and formula (II) above may be found in WO 2013/074947, which is incorporated herein by reference in its entirety.

[0680] Various publications described multimeric siRNA and can all be used with the iRNA agent. Such publications include WO2007/091269, U.S. Pat. No. 7,858,769, WO2010/141511, WO2007/117686, WO2009/014887 and WO2011/031520, which are hereby incorporated by reference in their entirety.

[0681] In some embodiments, 100%, 95%, 90%, 85%, 80%, 75%, 70%, 65%, 60%, 55%, 50%, 45%, 40%, 35% or 30% of the dsRNA agent is modified.

[0682] In some embodiments, each of the sense and antisense strands of the dsRNA agent is independently modified with acyclic nucleotides, LNA, HNA, CeNA, 2′-methoxyethyl, 2′-O-methyl, 2′-O-allyl, 2′-C-allyl, 2′-deoxy, 2′-fluoro, 2′-O—N-methylacetamido (2′-O—NMA), a 2′-O-dimethylaminoethoxyethyl (2′-O-DMAEOE), 2′-O-aminopropyl (2′-O-AP), or 2′-ara-F.

[0683] In some embodiments, each of the sense and antisense strands of the dsRNA agent contains at least two different modifications.

[0684] In some embodiments, the dsRNA agent does not contain any 2′-F modification.

[0685] In some embodiments, the dsRNA agent contains one, two, three, four, five, six, seven, eight, nine, ten, eleven or twelve 2′-F modification(s). In one example, the dsRNA agent contains nine or ten 2′-F modifications.

[0686] The dsRNA agent may further comprise at least one phosphorothioate or methylphosphonate internucleotide linkage. The phosphorothioate or methylphosphonate internucleotide linkage modification may occur on any nucleotide of the sense strand or antisense strand or both in any position of the strand. For instance, the internucleotide linkage modification may occur on every nucleotide on the sense strand or antisense strand; each internucleotide linkage modification may occur in an alternating pattern on the sense strand or antisense strand; or the sense strand or antisense strand may contain both internucleotide linkage modifications in an alternating pattern. The alternating pattern of the internucleotide linkage modification on the sense strand may be the same or different from the antisense strand, and the alternating pattern of the internucleotide linkage modification on the sense strand may have a shift relative to the alternating pattern of the internucleotide linkage modification on the antisense strand.

[0687] In one embodiment, the dsRNA agent comprises the phosphorothioate or methylphosphonate internucleotide linkage modification in the overhang region. For example, the overhang region may contain two nucleotides having a phosphorothioate or methylphosphonate internucleotide linkage between the two nucleotides. Internucleotide linkage modifications also may be made to link the overhang nucleotides with the terminal paired nucleotides within duplex region. For example, at least 2, 3, 4, or all the overhang nucleotides may be linked through phosphorothioate or methylphosphonate internucleotide linkage, and optionally, there may be additional phosphorothioate or methylphosphonate internucleotide linkages linking the overhang nucleotide with a paired nucleotide that is next to the overhang nucleotide. For instance, there may be at least two phosphorothioate internucleotide linkages between the terminal three nucleotides, in which two of the three nucleotides are overhang nucleotides, and the third is a paired nucleotide next to the overhang nucleotide. Preferably, these terminal three nucleotides may be at the 3′-end of the antisense strand.

[0688] In some embodiments, the sense strand and/or antisense strand of the dsRNA agent comprises one or more blocks of phosphorothioate or methylphosphonate internucleotide linkages. In one example, the sense strand comprises one block of two phosphorothioate or methylphosphonate internucleotide linkages. In one example, the antisense strand comprises two blocks of two phosphorothioate or methylphosphonate internucleotide linkages. For example, the two blocks of phosphorothioate or methylphosphonate internucleotide linkages are separated by 16-18 phosphate internucleotide linkages.

[0689] In some embodiments, the antisense strand of the dsRNA agent is 100% complementary to a target RNA to hybridize thereto and inhibits its expression through RNA interference. In another embodiment, the antisense strand of the dsRNA agent is at least 95%, at least 90%, at least 85%, at least 80%, at least 75%, at least 70%, at least 65%, at least 60%, at least 55%, or at least 50% complementary to a target RNA.

[0690] In one aspect, the invention relates to a dsRNA agent capable of inhibiting the expression of a target gene. The dsRNA agent comprises a sense strand and an antisense strand, each strand having 14 to 40 nucleotides. The sense strand contains at least one thermally destabilizing nucleotide, wherein at at least one said thermally destabilizing nucleotide occurs at or near the site that is opposite to the seed region of the antisense strand (i.e. at position 2-8 of the 5′-end of the antisense strand), For example, the thermally destabilizing nucleotide occurs between positions 14-17 of the 5′-end of the sense strand when the sense strand is 21 nucleotides in length. The antisense strand contains at least two modified nucleic acids that are smaller than a sterically demanding 2′-OMe modification. Preferably, the two modified nucleic acids that is smaller than a sterically demanding 2′-OMe are separated by 11 nucleotides in length. For example, the two modified nucleic acids are at positions 2 and 14 of the 5′ end of the antisense strand.

[0691] In some embodiments, the dsRNA agent disclosed herein is a miRNA mimic. In one design, miRNA mimics are double stranded molecules (e.g., with a duplex region of between about 16 and about 31 nucleotides in length) and contain one or more sequences that have identity with the mature strand of a given miRNA. Double-stranded miRNA mimics have designs similar to as described above for dsRNAs. In some embodiments, a miRNA mimic comprises a duplex region of between 16 and 31 nucleotides and one or more of the following chemical modification patterns: the sense strand contains 2′-O-methyl modifications of nucleotides 1 and 2 (counting from the 5′ end of the sense oligonucleotide), and all of the Cs and Us; the antisense strand modifications can comprise 2′ F modification of all of the Cs and Us, phosphorylation of the 5′ end of the oligonucleotide, and stabilized internucleotide linkages associated with a 2 nucleotide 3′ overhang.

[0692] In some embodiments, the dsRNA agent disclosed herein is an antimir. In some embodiments, compound comprises at least two antimirs covalently linked to each other via a nucleotide-based or non-nucleotide-based linker, for example a linker described in the disclosure, or non-covalently linked to each other. The terms “antimir” “microRNA inhibitor” or “miR inhibitor” are synonymous and refer to oligonucleotides or modified oligonucleotides that interfere with the activity of specific miRNAs. Inhibitors can adopt a variety of configurations including single stranded, double stranded (RNA/RNA or RNA/DNA duplexes), and hairpin designs, in general, microRNA inhibitors comprise one or more sequences or portions of sequences that are complementary or partially complementary with the mature strand (or strands) of the miRNA to be targeted, in addition, the miRNA inhibitor can also comprise additional sequences located 5′ and 3′ to the sequence that is the reverse complement of the mature miRNA. The additional sequences can be the reverse complements of the sequences that are adjacent to the mature miRNA in the pri-miRNA from which the mature miRNA is derived, or the additional sequences can be arbitrary sequences (having a mixture of A, G, C, U, or dT). In some embodiments, one or both of the additional sequences are arbitrary sequences capable of forming hairpins. Thus, in some embodiments, the sequence that is the reverse complement of the miRNA is flanked on the 5′ side and on the 3′ side by hairpin structures. MicroRNA inhibitors, when double stranded, can include mismatches between nucleotides on opposite strands. Furthermore, microRNA inhibitors can be linked to conjugate moieties in order to facilitate uptake of the inhibitor into a cell.

[0693] MicroRNA inhibitors, including hairpin miRNA inhibitors, are described in detail in Vermeulen et al., “Double-Stranded Regions Are Essential Design Components Of Potent Inhibitors of RISC Function,” RNA 13: 723-730 (2007) and in WO2007/095387 and WO 2008/036825 each of which is incorporated herein by reference in its entirety. A person of ordinary skill in the art can select a sequence from the database for a desired miRNA and design an inhibitor useful for the methods disclosed herein.

[0694] In some embodiments, the dsRNA agent disclosed herein is an antagomir. In some embodiments, the dsRNA agent comprises at least two antagomirs covalently linked to each other via a nucleotide-based or non-nucleotide-based linker, for example a linker described in the disclosure, or non-covalently linked to each other. Antagomirs are RNA-like oligonucleotides that harbor various modifications for RNAse protection and pharmacologic properties, such as enhanced tissue and cellular uptake. They differ from normal RNA by, for example, complete 2′-O-methylation of sugar, phosphorothioate intersugar linkage and, for example, a cholesterol-moiety at 3′-end. In a preferred embodiment, antagomir comprises a 2′-O-methyl modification at all nucleotides, a cholesterol moiety at 3′-end, two phosphorothioate intersugar linkages at the first two positions at the 5′-end and four phosphorothioate linkages at the 3′-end of the molecule. Antagomirs can be used to efficiently silence endogenous miRNAs by forming duplexes comprising the antagomir and endogenous miRNA, thereby preventing miRNA-induced gene silencing. An example of antagomir-mediated miRNA silencing is the silencing of miR-122, described in Krutzfeldt et al, Nature, 2005, 438: 685-689, which is expressly incorporated by reference herein in its entirety.

[0695] Recent studies have found that dsRNA can also activate gene expression, a mechanism that has been termed “small RNA-induced gene activation” or RNAa (activating RNA). See for example Li, L.C. et al. Proc Natl Acad Sci USA. (2006), 103(46):17337-42 and Li L. C. (2008). “Small RNA-Mediated Gene Activation”. RNA and the Regulation of Gene Expression: A Hidden Layer of Complexity. Caister Academic Press. ISBN 978-1-904455-25-7. It has been shown that dsRNAs targeting gene promoters induce potent transcriptional activation of associated genes. Endogenous miRNA that cause RNAa has also been found in humans. Check E. Nature (2007). 448 (7156): 855-858.

[0696] Another surprising observation is that gene activation by RNAa is long-lasting. Induction of gene expression has been seen to last for over ten days. The prolonged effect of RNAa could be attributed to epigenetic changes at dsRNA target sites. In some embodiments, the RNA activator can increase the expression of a gene. In some embodiments, increased gene expression inhibits viability, growth development, and/or reproduction.

[0697] Accordingly, in some embodiments, the dsRNA agent disclosed herein is activating RNA. In some embodiments, the dsRNA agent comprises at least two activating RNAs covalently linked to each other via a nucleotide-based or non-nucleotide-based linker, for example a linker described in the disclosure, or non-covalently linked to each other.

[0698] Accordingly, in some embodiments, the dsRNA agent disclosed herein is a triplex forming oligonucleotide (TFO). In some embodiments, the dsRNA agent comprises at least two TFOs covalently linked to each other via a nucleotide-based or non-nucleotide-based linker, for example a linker described in the disclosure, or non-covalently linked to each other. Recent studies have shown that triplex forming oligonucleotides can be designed which can recognize and bind to polypurine/polypyrimidine regions in double-stranded helical DNA in a sequence-specific manner. These recognition rules are outline by Maher III, L. J., et al., Science (1989) vol. 245, pp 725-730; Moser, H. E., et al., Science (1987) vol. 238, pp 645-630; Beal, P. A., et al., Science (1992) vol. 251, pp 1360-1363; Conney, M., et al., Science (1988) vol. 241, pp 456-459 and Hogan, M. E., et al., EP Publication 375408. Modification of the oligonucleotides, such as the introduction of intercalators and intersugar linkage substitutions, and optimization of binding conditions (pH and cation concentration) have aided in overcoming inherent obstacles to TFO activity such as charge repulsion and instability, and it was recently shown that synthetic oligonucleotides can be targeted to specific sequences (for a recent review see Seidman and Glazer, J Clin Invest 2003; 1 12:487-94). In general, the triplex-forming oligonucleotide has the sequence correspondence:

oligo
3′-A GGT
duplex
5′-A G CT
duplex
3′-T C GA

[0699] However, it has been shown that the A-AT and G-GC triplets have the greatest triple helical stability (Reither and Jeltsch, BMC Biochem, 2002, Seρtl2, Epub). The same authors have demonstrated that TFOs designed according to the A-AT and G-GC rule do not form non-specific triplexes, indicating that the triplex formation is indeed sequence specific.

[0700] Thus for any given sequence a triplex forming sequence can be devised. Triplex-forming oligonucleotides preferably are at least 15, more preferably 25, still more preferably 30 or more nucleotides in length, up to 50 or 100 nucleotides.

[0701] Formation of the triple helical structure with the target DNA induces steric and functional changes, blocking transcription initiation and elongation, allowing the introduction of desired sequence changes in the endogenous DNA and resulting in the specific down-regulation of gene expression. Examples of such suppression of gene expression in cells treated with TFOs include knockout of episomal supFGl and endogenous HPRT genes in mammalian cells (Vasquez et al., Nucl Acids Res. 1999; 27: 1176-81, and Puri, et al, J Biol Chem, 2001; 276:28991-98), and the sequence- and target specific downregulation of expression of the Ets2 transcription factor, important in prostate cancer etiology (Carbone, et al, Nucl Acid Res. 2003; 31:833-43), and the pro-inflammatory ICAM-I gene (Besch et al, J Biol Chem, 2002; 277:32473-79). In addition, Vuyisich and Beal have recently shown that sequence specific TFOs can bind to dsRNA, inhibiting activity of dsRNA-dependent enzymes such as RNA-dependent kinases (Vuyisich and Beal, Nuc. Acids Res 2000; 28:2369-74).

[0702] Additionally, TFOs designed according to the abovementioned principles can induce directed mutagenesis capable of effecting DNA repair, thus providing both down-regulation and up-regulation of expression of endogenous genes (Seidman and Glazer, J Clin Invest 2003; 112:487-94). Detailed description of the design, synthesis and administration of effective TFOs can be found in U.S. Pat. App. Nos. 2003 017068 and 2003 0096980 to Froehler et al, and 2002 0128218 and 2002 0123476 to Emanuele et al, and U.S. Pat. No. 5,721,138 to Lawn, contents of which are herein incorporated in their entireties.

### Nucleic Acid Modifications

[0703] In some embodiments, the dsRNA agent comprises at least one nucleic acid modification described herein. For example, at least one modification selected from the group consisting of modified internucleoside linkage, modified nucleobase, modified sugar, and any combinations thereof. Without limitations, such a modification can be present anywhere in the dsRNA agent. For example, the modification can be present in one of the RNA molecules.

### Nucleic Acid Modifications (Nucleobases)

[0704] The naturally occurring base portion of a nucleoside is typically a heterocyclic base. The two most common classes of such heterocyclic bases are the purines and the pyrimidines. For those nucleosides that include a pentofuranosyl sugar, a phosphate group can be linked to the 2′, 3′ or 5′ hydroxyl moiety of the sugar. In forming oligonucleotides, those phosphate groups covalently link adjacent nucleosides to one another to form a linear polymeric compound. Within oligonucleotides, the phosphate groups are commonly referred to as forming the internucleoside backbone of the oligonucleotide. The naturally occurring linkage or backbone of RNA and of DNA is a 3′ to 5′ phosphodiester linkage.

[0705] In addition to “unmodified” or “natural” nucleobases such as the purine nucleobases adenine (A) and guanine (G), and the pyrimidine nucleobases thymine (T), cytosine (C) and uracil (U), many modified nucleobases or nucleobase mimetics known to those skilled in the art are amenable with the compounds described herein. The unmodified or natural nucleobases can be modified or replaced to provide iRNAs having improved properties. For example, nuclease resistant oligonucleotides can be prepared with these bases or with synthetic and natural nucleobases (e.g., inosine, xanthine, hypoxanthine, nubularine, isoguanisine, or tubercidine) and any one of the oligomer modifications described herein. Alternatively, substituted or modified analogs of any of the above bases and “universal bases” can be employed. When a natural base is replaced by a non-natural and/or universal base, the nucleotide is said to comprise a modified nucleobase and/or a nucleobase modification herein. Modified nucleobase and/or nucleobase modifications also include natural, non-natural and universal bases, which comprise conjugated moieties, e.g. a ligand described herein. Preferred conjugate moieties for conjugation with nucleobases include cationic amino groups which can be conjugated to the nucleobase via an appropriate alkyl, alkenyl or a linker with an amide linkage.

[0706] An oligomeric compound described herein can also include nucleobase (often referred to in the art simply as “base”) modifications or substitutions. As used herein, “unmodified” or “natural” nucleobases include the purine bases adenine (A) and guanine (G), and the pyrimidine bases thymine (T), cytosine (C) and uracil (U). Exemplary modified nucleobases include, but are not limited to, other synthetic and natural nucleobases such as inosine, xanthine, hypoxanthine, nubularine, isoguanisine, tubercidine, 2-(halo)adenine, 2-(alkyl)adenine, 2-(propyl)adenine, 2-(amino)adenine, 2-(aminoalkyll)adenine, 2-(aminopropyl)adenine, 2-(methylthio)-N⁶-(isopentenyl)adenine, 6-(alkyl)adenine, 6-(methyl)adenine, 7-(deaza)adenine, 8-(alkenyl)adenine, 8-(alkyl)adenine, 8-(alkynyl)adenine, 8-(amino)adenine, 8-(halo)adenine, 8-(hydroxyl)adenine, 8-(thioalkyl)adenine, 8-(thiol)adenine, N⁶-(isopentyl)adenine, N⁶-(methyl)adenine, N⁶, N⁶-(dimethyl)adenine, 2-(alkyl)guanine, 2-(propyl)guanine, 6-(alkyl)guanine, 6-(methyl)guanine, 7-(alkyl)guanine, 7-(methyl)guanine, 7-(deaza)guanine, 8-(alkyl)guanine, 8-(alkenyl)guanine, 8-(alkynyl)guanine, 8-(amino)guanine, 8-(halo)guanine, 8-(hydroxyl)guanine, 8-(thioalkyl)guanine, 8-(thiol)guanine, N-(methyl)guanine, 2-(thio)cytosine, 3-(deaza)-5-(aza)cytosine, 3-(alkyl)cytosine, 3-(methyl)cytosine, 5-(alkyl)cytosine, 5-(alkynyl)cytosine, 5-(halo)cytosine, 5-(methyl)cytosine, 5-(propynyl)cytosine, 5-(propynyl)cytosine, 5-(trifluoromethyl)cytosine, 6-(azo)cytosine, N⁴-(acetyl)cytosine, 3-(3-amino-3-carboxypropyl)uracil, 2-(thio)uracil, 5-(methyl)-2-(thio)uracil, 5-(methylaminomethyl)-2-(thio)uracil, 4-(thio)uracil, 5-(methyl)-4-(thio)uracil, 5-(methylaminomethyl)-4-(thio)uracil, 5-(methyl)-2,4-(dithio)uracil, 5-(methylaminomethyl)-2,4-(dithio)uracil, 5-(2-aminopropyl)uracil, 5-(alkyl)uracil, 5-(alkynyl)uracil, 5-(allylamino)uracil, 5-(aminoallyl)uracil, 5-(aminoalkyl)uracil, 5-(guanidiniumalkyl)uracil, 5-(1,3-diazole-1-alkyl)uracil, 5-(cyanoalkyl)uracil, 5-(dialkylaminoalkyl)uracil, 5-(dimethylaminoalkyl)uracil, 5-(halo)uracil, 5-(methoxy)uracil, uracil-5-oxyacetic acid, 5-(methoxycarbonylmethyl)-2-(thio)uracil, 5-(methoxycarbonyl-methyl)uracil, 5-(propynyl)uracil, 5-(propynyl)uracil, 5-(trifluoromethyl)uracil, 6-(azo)uracil, dihydrouracil, N³-(methyl)uracil, 5-uracil (i.e., pseudouracil), 2-(thio)pseudouracil, 4-(thio)pseudouracil, 2,4-(dithio)pseudouracil, 5-(alkyl)pseudouracil, 5-(methyl)pseudouracil, 5-(alkyl)-2-(thio)pseudouracil, 5-(methyl)-2-(thio)pseudouracil, 5-(alkyl)-4-(thio)pseudouracil, 5-(methyl)-4-(thio)pseudouracil, 5-(alkyl)-2,4-(dithio)pseudouracil, 5-(methyl)-2,4-(dithio)pseudouracil, 1-substituted pseudouracil, 1-substituted 2(thio)-pseudouracil, 1-substituted 4-(thio)pseudouracil, 1-substituted 2,4-(dithio)pseudouracil, 1-(aminocarbonylethylenyl)-pseudouracil, 1-(aminocarbonylethylenyl)-2(thio)-pseudouracil, 1-(aminocarbonylethylenyl)-4-(thio)pseudouracil, 1-(aminocarbonylethylenyl)-2,4-(dithio)pseudouracil, 1-(aminoalkylaminocarbonylethylenyl)-pseudouracil, 1-(aminoalkylamino-carbonylethylenyl)-2(thio)-pseudouracil, 1-(aminoalkylaminocarbonylethylenyl)-4-(thio)pseudouracil, 1-(aminoalkylaminocarbonylethylenyl)-2,4-(dithio)pseudouracil, 1,3-(diaza)-2-(oxo)-phenoxazin-1-yl, 1-(aza)-2-(thio)-3-(aza)-phenoxazin-1-yl, 1,3-(diaza)-2-(oxo)-phenthiazin-1-yl, 1-(aza)-2-(thio)-3-(aza)-phenthiazin-1-yl, 7-substituted 1,3-(diaza)-2-(oxo)-phenoxazin-1-yl, 7-substituted 1-(aza)-2-(thio)-3-(aza)-phenoxazin-1-yl, 7-substituted 1,3-(diaza)-2-(oxo)-phenthiazin-1-yl, 7-substituted 1-(aza)-2-(thio)-3-(aza)-phenthiazin-1-yl, 7-(aminoalkylhydroxy)-1,3-(diaza)-2-(oxo)-phenoxazin-1-yl, 7-(aminoalkylhydroxy)-1-(aza)-2-(thio)-3-(aza)-phenoxazin-1-yl, 7-(aminoalkylhydroxy)-1,3-(diaza)-2-(oxo)-phenthiazin-1-yl, 7-(aminoalkylhydroxy)-1-(aza)-2-(thio)-3-(aza)-phenthiazin-1-yl, 7-(guanidiniumalkylhydroxy)-1,3-(diaza)-2-(oxo)-phenoxazin-1-yl, 7-(guanidiniumalkylhydroxy)-1-(aza)-2-(thio)-3-(aza)-phenoxazin-1-yl, 7-(guanidiniumalkyl-hydroxy)-1,3-(diaza)-2-(oxo)-phenthiazin-1-yl, 7-(guanidiniumalkylhydroxy)-1-(aza)-2-(thio)-3-(aza)-phenthiazin-1-yl, 1,3,5-(triaza)-2,6-(dioxa)-naphthalene, inosine, xanthine, hypoxanthine, nubularine, tubercidine, isoguanisine, inosinyl, 2-aza-inosinyl, 7-deaza-inosinyl, nitroimidazolyl, nitropyrazolyl, nitrobenzimidazolyl, nitroindazolyl, aminoindolyl, pyrrolopyrimidinyl, 3-(methyl)isocarbostyrilyl, 5-(methyl)isocarbostyrilyl, 3-(methyl)-7-(propynyl)isocarbostyrilyl, 7-(aza)indolyl, 6-(methyl)-7-(aza)indolyl, imidizopyridinyl, 9-(methyl)-imidizopyridinyl, pyrrolopyrizinyl, isocarbostyrilyl, 7-(propynyl)isocarbostyrilyl, propynyl-7-(aza)indolyl, 2,4,5-(trimethyl)phenyl, 4-(methyl)indolyl, 4,6-(dimethyl)indolyl, phenyl, napthalenyl, anthracenyl, phenanthracenyl, pyrenyl, stilbenyl, tetracenyl, pentacenyl, difluorotolyl, 4-(fluoro)-6-(methyl)benzimidazole, 4-(methyl)benzimidazole, 6-(azo)thymine, 2-pyridinone, 5-nitroindole, 3-nitropyrrole, 6-(aza)pyrimidine, 2-(amino)purine, 2,6-(diamino)purine, 5-substituted pyrimidines, N²-substituted purines, N⁶-substituted purines, O⁶-substituted purines, substituted 1,2,4-triazoles, pyrrolo-pyrimidin-2-on-3-yl, 6-phenyl-pyrrolo-pyrimidin-2-on-3-yl, para-substituted-6-phenyl-pyrrolo-pyrimidin-2-on-3-yl, ortho-substituted-6-phenyl-pyrrolo-pyrimidin-2-on-3-yl, bis-ortho-substituted-6-phenyl-pyrrolo-pyrimidin-2-on-3-yl, para-(aminoalkylhydroxy)-6-phenyl-pyrrolo-pyrimidin-2-on-3-yl, ortho-(aminoalkylhydroxy)-6-phenyl-pyrrolo-pyrimidin-2-on-3-yl, bis-ortho--(aminoalkylhydroxy)-6-phenyl-pyrrolo-pyrimidin-2-on-3-yl, pyridopyrimidin-3-yl, 2-oxo-7-amino-pyridopyrimidin-3-yl, 2-oxo-pyridopyrimidine-3-yl, or any O-alkylated or N-alkylated derivatives thereof. Alternatively, substituted or modified analogs of any of the above bases and “universal bases” can be employed.

[0707] As used herein, a universal nucleobase is any nucleobase that can base pair with all of the four naturally occurring nucleobases without substantially affecting the melting behavior, recognition by intracellular enzymes or activity of the iRNA duplex. Some exemplary universal nucleobases include, but are not limited to, 2,4-difluorotoluene, nitropyrrolyl, nitroindolyl, 8-aza-7-deazaadenine, 4-fluoro-6-methylbenzimidazle, 4-methylbenzimidazle, 3-methyl isocarbostyrilyl, 5-methyl isocarbostyrilyl, 3-methyl-7-propynyl isocarbostyrilyl, 7-azaindolyl, 6-methyl-7-azaindolyl, imidizopyridinyl, 9-methyl-imidizopyridinyl, pyrrolopyrizinyl, isocarbostyrilyl, 7-propynyl isocarbostyrilyl, propynyl-7-azaindolyl, 2,4,5-trimethylphenyl, 4-methylinolyl, 4,6-dimethylindolyl, phenyl, napthalenyl, anthracenyl, phenanthracenyl, pyrenyl, stilbenyl, tetracenyl, pentacenyl, and structural derivatives thereof (see for example, Loakes, 2001, Nucleic Acids Research, 29, 2437-2447).

[0708] Further nucleobases include those disclosed in U.S. Pat. No. 3,687,808; those disclosed in International Application No. PCT/US09/038425, filed Mar. 26, 2009; those disclosed in the Concise Encyclopedia Of Polymer Science And Engineering, pages 858-859, Kroschwitz, J. I., ed. John Wiley & Sons, 1990; those disclosed by English et al., Angewandte Chemie, International Edition, 1991, 30, 613; those disclosed in Modified Nucleosides in Biochemistry, Biotechnology and Medicine, Herdewijin, P. Ed. Wiley-VCH, 2008; and those disclosed by Sanghvi, Y. S., Chapter 15, dsRNA Research and Applications, pages 289-302, Crooke, S. T. and Lebleu, B., Eds., CRC Press, 1993. Contents of all of the above are herein incorporated by reference.

[0709] In certain embodiments, a modified nucleobase is a nucleobase that is fairly similar in structure to the parent nucleobase, such as for example a 7-deaza purine, a 5-methyl cytosine, or a G-clamp. In certain embodiments, nucleobase mimetic include more complicated structures, such as for example a tricyclic phenoxazine nucleobase mimetic. Methods for preparation of the above noted modified nucleobases are well known to those skilled in the art.

### Nucleic Acid Modifications (Sugar)

[0710] The dsRNA agent provided herein can comprise one or more (e.g., 1, 2, 3, 4, 5, 6, 7, 8, 9, 10, 11, 12, 13, 14, 15 or more) monomer, including a nucleoside or nucleotide, having a modified sugar moiety. For example, the furanosyl sugar ring of a nucleoside can be modified in a number of ways including, but not limited to, addition of a substituent group, bridging of two non-geminal ring atoms to form a locked nucleic acid or bicyclic nucleic acid. In certain embodiments, oligomeric compounds comprise one or more (e.g., 1, 2, 3, 4, 5, 6, 7, 8, 9, 10, 11, 12, 13, 14, 15 or more) monomers that are LNA.

[0711] In some embodiments of a locked nucleic acid, the 2′ position of furnaosyl is connected to the 4′ position by a linker selected independently from —[C(R1)(R2)]ₙ—, —[C(R1)(R2)]ₙ-O—, —[C(R1)(R2)]ₙ-N(R1)-, —[C(R1)(R2)]ₙ-N(R1)-O—, —[C(R1R2)]ₙ-O—N(R1)-, —C(R1)≡C(R2)-O—, —C(R1)=N—, —C(R1)=N—O—, —C(═NR1)-, —C(═NR1)-O—, —C(═O)—, —C(═O)O—, —C(═S)—, —C(═S)O—, —C(═S)S—, —O—, —Si(R1)2-, —S(═O)ₓ— and —N(R1)-;
[0712] wherein:
[0713] x is 0, 1, or 2;
[0714] n is 1, 2, 3, or 4;
[0715] each R1 and R2 is, independently, H, a protecting group, hydroxyl, C1-C12 alkyl, substituted C1-C12 alkyl, C2-C12 alkenyl, substituted C2-C12 alkenyl, C2-C12 alkynyl, substituted C2-C12 alkynyl, C5-C20 aryl, substituted C5-C20 aryl, heterocycle radical, substituted heterocycle radical, heteroaryl, substituted heteroaryl, C5-C7 alicyclic radical, substituted C5-C7 alicyclic radical, halogen, OJ1, NJ1J2, SJ1, N3, COOJ1, acyl (C(═O)—H), substituted acyl, CN, sulfonyl (S(═O)2-J1), or sulfoxyl (S(═O)-J1); and each J1 and J2 is, independently, H, C1-C12 alkyl, substituted C1-C12 alkyl, C2-C12 alkenyl, substituted C2-C12 alkenyl, C2-C12 alkynyl, substituted C2-C12 alkynyl, C5-C20 aryl, substituted C5-C20 aryl, acyl (C(═O)—H), substituted acyl, a heterocycle radical, a substituted heterocycle radical, C1-C12 aminoalkyl, substituted C₁-C₁₂ aminoalkyl or a protecting group.

[0716] In some embodiments, each of the linkers of the LNA compounds is, independently, —[C(R1)(R2)]n-, —[C(R1)(R2)]n-O—, —C(R1R2)-N(R1)-O— or —C(R1R2)-O—N(R1)-. In another embodiment, each of said linkers is, independently, 4′-CH₂-2′, 4′-(CH₂)2-2′, 4′-(CH₂)3-2′, 4′-CH₂—O-2′, 4′-(CH₂)2-O-2′, 4′-CH₂—O—N(R1)-2′ and 4′-CH₂—N(R1)-O-2′- wherein each R1 is, independently, H, a protecting group or C1-C12 alkyl.

[0717] Certain LNA's have been prepared and disclosed in the patent literature as well as in scientific literature (Singh et al., Chem. Commun., 1998, 4, 455-456; Koshkin et al., Tetrahedron, 1998, 54, 3607-3630; Wahlestedt et al., Proc. Natl. Acad. Sci. U.S.A., 2000, 97, 5633-5638; Kumar et al., Bioorg. Med. Chem. Lett., 1998, 8, 2219-2222; WO 94/14226; WO 2005/021570; Singh et al., J. Org. Chem., 1998, 63, 10035-10039; Examples of issued US patents and published applications that disclose LNA s include, for example, U.S. Pat. Nos. 7,053,207; 6,268,490; 6,770,748; 6,794,499; 7,034,133; and 6,525,191; and U.S. Pre-Grant Publication Nos. 2004-0171570; 2004-0219565; 2004-0014959; 2003-0207841; 2004-0143114; and 20030082807.

[0718] Also provided herein are LNAs in which the 2′-hydroxyl group of the ribosyl sugar ring is linked to the 4′ carbon atom of the sugar ring thereby forming a methyleneoxy (4′-CH₂—O-2′) linkage to form the bicyclic sugar moiety (reviewed in Elayadi et al., Curr. Opinion Invens. Drugs, 2001, 2, 558-561; Braasch et al., Chem. Biol., 2001, 8 1-7; and Orum et al., Curr. Opinion Mol. Ther., 2001, 3, 239-243; see also U.S. Pat. Nos. 6,268,490 and 6,670,461). The linkage can be a methylene (—CH₂—) group bridging the 2′ oxygen atom and the 4′ carbon atom, for which the term methyleneoxy (4′-CH₂—O-2′) LNA is used for the bicyclic moiety; in the case of an ethylene group in this position, the term ethyleneoxy (4′-CH₂CH₂—O-2′) LNA is used (Singh et al., Chem. Commun., 1998, 4, 455-456: Morita et al., Bioorganic Medicinal Chemistry, 2003, 11, 2211-2226). Methyleneoxy (4′-CH₂—O-2′) LNA and other bicyclic sugar analogs display very high duplex thermal stabilities with complementary DNA and RNA (Tm=+3 to +10° C.), stability towards 3′-exonucleolytic degradation and good solubility properties. Potent and nontoxic antisense oligonucleotides comprising BNAs have been described (Wahlestedt et al., Proc. Natl. Acad. Sci. U.S.A., 2000, 97, 5633-5638).

[0719] An isomer of methyleneoxy (4′-CH₂—O-2′) LNA that has also been discussed is alpha-L-methyleneoxy (4′-CH₂—O-2′) LNA which has been shown to have superior stability against a 3′-exonuclease. The alpha-L-methyleneoxy (4′-CH₂—O-2′) LNA's were incorporated into antisense gapmers and chimeras that showed potent antisense activity (Frieden et al., Nucleic Acids Research, 2003, 21, 6365-6372).

[0720] The synthesis and preparation of the methyleneoxy (4′-CH₂—O-2′) LNA monomers adenine, cytosine, guanine, 5-methyl-cytosine, thymine and uracil, along with their oligomerization, and nucleic acid recognition properties have been described (Koshkin et al., Tetrahedron, 1998, 54, 3607-3630). BNAs and preparation thereof are also described in WO 98/39352 and WO 99/14226.

[0721] Analogs of methyleneoxy (4′-CH₂—O-2′) LNA, phosphorothioate-methyleneoxy (4′-CH₂—O-2′) LNA and 2′-thio-LNAs, have also been prepared (Kumar et al., Bioorg. Med. Chem. Lett., 1998, 8, 2219-2222). Preparation of locked nucleoside analogs comprising oligodeoxyribonucleotide duplexes as substrates for nucleic acid polymerases has also been described (Wengel et al., WO 99/14226). Furthermore, synthesis of 2′-amino-LNA, a novel comformationally restricted high-affinity oligonucleotide analog has been described in the art (Singh et al., J. Org. Chem., 1998, 63, 10035-10039). In addition, 2′-Amino- and 2′-methylamino-LNA's have been prepared and the thermal stability of their duplexes with complementary RNA and DNA strands has been previously reported.

[0722] Modified sugar moieties are well known and can be used to alter, typically increase, the affinity of the antisense compound for its target and/or increase nuclease resistance. A representative list of preferred modified sugars includes but is not limited to bicyclic modified sugars, including methyleneoxy (4′-CH₂—O-2′) LNA and ethyleneoxy (4′-(CH₂)₂—O-2′ bridge) ENA; substituted sugars, especially 2′-substituted sugars having a 2′-F, 2′-OCH₃ or a 2′-O(CH₂)₂—OCH₃ substituent group; 4′-thio modified sugars, 3′-RNA, TNA, and L-nucleotides, inverted nucleotides (5′->5′ or 3′->3′ bonded), and inverted abasic nucleotides. Sugars can also be replaced with sugar mimetic groups among others. Methods for the preparations of modified sugars are well known to those skilled in the art. Some representative patents and publications that teach the preparation of such modified sugars include, but are not limited to, U.S. Pat. Nos. 4,981,957; 5,118,800; 5,319,080; 5,359,044; 5,393,878; 5,446,137; 5,466,786; 5,514,785; 5,519,134; 5,567,811; 5,576,427; 5,591,722; 5,597,909; 5,610,300; 5,627,053; 5,639,873; 5,646,265; 5,658,873; 5,670,633; 5,792,747; 5,700,920; 6,531,584; and 6,600,032; and WO 2005/121371.

[0723] Examples of “oxy”-2′ hydroxyl group modifications include alkoxy or aryloxy (OR, e.g., R═H, alkyl, cycloalkyl, aryl, aralkyl, heteroaryl or sugar); polyethyleneglycols (PEG), O(CH₂CH₂O)CH₂CH₂OR, n=1-50; “locked” nucleic acids (LNA) in which the furanose portion of the nucleoside includes a bridge connecting two carbon atoms on the furanose ring, thereby forming a bicyclic ring system; O-AMINE or O—(CH₂)ₙAMINE (n=1-10, AMINE=NH₂; alkylamino, dialkylamino, heterocyclyl, arylamino, diaryl amino, heteroaryl amino, diheteroaryl amino, ethylene diamine or polyamino); and O—CH₂CH₂(NCH₂CH₂NMe₂)₂.

[0724] “Deoxy” modifications include hydrogen (i.e. deoxyribose sugars, which are of particular relevance to the single-strand overhangs); halo (e.g., fluoro); amino (e.g. NH₂; alkylamino, dialkylamino, heterocyclyl, arylamino, diaryl amino, heteroaryl amino, diheteroaryl amino, or amino acid); NH(CH₂CH₂NH)ₙCH₂CH₂-AMINE (AMINE=NH₂; alkylamino, dialkylamino, heterocyclyl, arylamino, diaryl amino, heteroaryl amino, or diheteroaryl amino); —NHC(O)R (R=alkyl, cycloalkyl, aryl, aralkyl, heteroaryl or sugar); cyano; mercapto; alkyl-thio-alkyl; thioalkoxy; thioalkyl; alkyl; cycloalkyl; aryl; alkenyl and alkynyl, which can be optionally substituted with e.g., an amino functionality.

[0725] Other suitable 2′-modifications, e.g., modified MOE, are described in U.S. Patent Application Publication No. 20130130378, contents of which are herein incorporated by reference.

[0726] A modification at the 2′ position can be present in the arabinose configuration The term “arabinose configuration” refers to the placement of a substituent on the C2′ of ribose in the same configuration as the 2′-OH is in the arabinose.

[0727] The sugar can comprise two different modifications at the same carbon in the sugar, e.g., gem modification. The sugar group can also contain one or more carbons that possess the opposite stereochemical configuration than that of the corresponding carbon in ribose. Thus, an oligomeric compound can include one or more monomers containing e.g., arabinose, as the sugar. The monomer can have an alpha linkage at the 1′ position on the sugar, e.g., alpha-nucleosides. The monomer can also have the opposite configuration at the 4′-position, e.g., C5′ and H4′ or substituents replacing them are interchanged with each other. When the C5′ and H4′ or substituents replacing them are interchanged with each other, the sugar is said to be modified at the 4′ position.

[0728] The double-stranded RNA agent disclosed herein can also include abasic sugars, i.e., a sugar which lack a nucleobase at C-1′ or has other chemical groups in place of a nucleobase at C1′. See for example U.S. Pat. No. 5,998,203, content of which is herein incorporated in its entirety. These abasic sugars can also be further containing modifications at one or more of the constituent sugar atoms. The dsRNA agent can also contain one or more sugars that are the L isomer, e.g. L-nucleosides. Modification to the sugar group can also include replacement of the 4′-O with a sulfur, optionally substituted nitrogen or CH₂ group. In some embodiments, linkage between C1′ and nucleobase is in a configuration.

[0729] Sugar modifications can also include acyclic nucleotides, wherein a C—C bonds between ribose carbons (e.g., C1′-C2′, C2′-C3′, C3′-C4′, C4′-04′, C1′-04′) is absent and/or at least one of ribose carbons or oxygen (e.g., C1′, C2′, C3′, C4′ or 04′) are independently or in combination absent from the nucleotide. In some embodiments, acyclic nucleotide is

[chemical structure]

wherein B is a modified or unmodified nucleobase, R₁ and R₂ independently are H, halogen, OR₃, or alkyl; and R₃ is H, alkyl, cycloalkyl, aryl, aralkyl, heteroaryl or sugar).

[0730] In some embodiments, sugar modifications are selected from the group consisting of 2′-H, 2′-O-Me (2′-O-methyl), 2′-O-MOE (2′-O-methoxyethyl), 2′-F, 2′-O-[2-(methylamino)-2-oxoethyl](2′-O—NMA), 2′-S-methyl, 2′-O—CH₂-(4′-C) (LNA), 2′-O—CH₂CH₂-(4′-C) (ENA), 2′-O-aminopropyl (2′-O-AP), 2′-O-dimethylaminoethyl (2′-O-DMAOE), 2′-O-dimethylaminopropyl (2′-O-DMAP), 2′-O-dimethylaminoethyloxyethyl (2′-O-DMAEOE) and gem 2′-OMe/2′F with 2′-O-Me in the arabinose configuration.

[0731] It is to be understood that when a particular nucleotide is linked through its 2′-position to the next nucleotide, the sugar modifications described herein can be placed at the 3′-position of the sugar for that particular nucleotide, e.g., the nucleotide that is linked through its 2′-position. A modification at the 3′ position can be present in the xylose configuration The term “xylose configuration” refers to the placement of a substituent on the C3′ of ribose in the same configuration as the 3′-OH is in the xylose sugar.

[0732] The hydrogen attached to C4′ and/or C1′ can be replaced by a straight- or branched-optionally substituted alkyl, optionally substituted alkenyl, optionally substituted alkynyl, wherein backbone of the alkyl, alkenyl and alkynyl can contain one or more of 0, S, S(O), SO₂, N(R′), C(O), N(R′)C(O)O, OC(O)N(R′), CH(Z′), phosphorous containing linkage, optionally substituted aryl, optionally substituted heteroaryl, optionally substituted heterocyclic or optionally substituted cycloalkyl, where R′ is hydrogen, acyl or optionally substituted aliphatic, Z′ is selected from the group consisting of OR₁₁, COR₁₁, CO₂R₁₁,

[chemical structure]

NR₂₁R₃₁, CONR₂₁R₃₁, CON(H)NR₂₁R₃₁, ONR₂₁R₃₁, CON(H)N═CR₄₁R₅₁, N(R₂₁)C(═NR₃₁)NR₂₁R₃₁, N(R₂₁)C(O)NR₂₁R₃₁, N(R₂₁)C(S)NR₂₁R₃₁, OC(O)NR₂₁R₃₁, SC(O)NR₂₁R₃₁, N(R₂₁)C(S)OR₁₁, N(R₂₁)C(O)OR₁₁, N(R₂₁)C(O)SR₁₁, N(R₂₁)N═CR₄₁R₅₁, ON═CR₄₁R₅₁, SO₂R₁₁, SOR₁₁, SR₁₁, and substituted or unsubstituted heterocyclic; R₂₁ and R₃₁ for each occurrence are independently hydrogen, acyl, unsubstituted or substituted aliphatic, aryl, heteroaryl, heterocyclic, OR₁₁, COR₁₁, CO₂R₁₁, or NR₁₁R₁₁′; or R₂₁ and R₃₁, taken together with the atoms to which they are attached, form a heterocyclic ring; R₄₁ and R₅₁ for each occurrence are independently hydrogen, acyl, unsubstituted or substituted aliphatic, aryl, heteroaryl, heterocyclic, OR₁₁, COR₁₁, or CO₂R₁₁, or NR₁₁R₁₁′; and R₁₁ and R₁₁′ are independently hydrogen, aliphatic, substituted aliphatic, aryl, heteroaryl, or heterocyclic. In some embodiments, the hydrogen attached to the C4′ of the 5′ terminal nucleotide is replaced.

[0733] In some embodiments, C4′ and C5′ together form an optionally substituted heterocyclic, preferably comprising at least one —PX(Y)—, wherein X is H, OH, OM, SH, optionally substituted alkyl, optionally substituted alkoxy, optionally substituted alkylthio, optionally substituted alkylamino or optionally substituted dialkylamino, where M is independently for each occurrence an alki metal or transition metal with an overall charge of +1; and Y is O, S, or NR′, where R′ is hydrogen, optionally substituted aliphatic. Preferably this modification is at the 5 terminal of the iRNA.

[0734] In certain embodiments, LNA's include bicyclic nucleoside having the formula:

[chemical structure]

[0735] wherein:
[0736] Bx is a heterocyclic base moiety;
[0737] T₁ is H or a hydroxyl protecting group;
[0738] T₂ is H, a hydroxyl protecting group or a reactive phosphorus group;
[0739] Z is C₁-C₆ alkyl, C₂-C₆ alkenyl, C₂-C₆ alkynyl, substituted C₁-C₆ alkyl, substituted C₂-C₆ alkenyl, substituted C₂-C₆ alkynyl, acyl, substituted acyl, or substituted amide.

[0740] In some embodiments, each of the substituted groups, is, independently, mono or poly substituted with optionally protected substituent groups independently selected from halogen, oxo, hydroxyl, OJ1, NJ1J2, SJ1, N3, OC(═X)J1, OC(═X)NJ1J2, NJ3C(═X)NJ1J2 and CN, wherein each J1, J2 and J3 is, independently, H or C₁-C₆ alkyl, and X is 0, S or NJ1.

[0741] In certain such embodiments, each of the substituted groups, is, independently, mono or poly substituted with substituent groups independently selected from halogen, oxo, hydroxyl, OJ1, NJ1J2, SJ1, N3, OC(═X)J1, and NJ3C(═X)NJ1J2, wherein each J1, J2 and J3 is, independently, H, C₁-C₆ alkyl, or substituted C₁-C₆ alkyl and X is 0 or NJ1.

[0742] In certain embodiments, the Z group is C₁-C₆ alkyl substituted with one or more Xx, wherein each Xx is independently OJ1, NJ1J2, SJ1, N3, OC(═X)J1, OC(═X)NJ1J2, NJ3C(═X)NJ1J2 or CN; wherein each J1, J2 and J3 is, independently, H or C₁-C₆ alkyl, and X is O, S or NJ1. In another embodiment, the Z group is C₁-C₆ alkyl substituted with one or more Xx, wherein each Xx is independently halo (e.g., fluoro), hydroxyl, alkoxy (e.g., CH₃O—), substituted alkoxy or azido.

[0743] In certain embodiments, the Z group is —CH₂Xx, wherein Xx is OJ1, NJ1J2, SJ1, N3, OC(═X)J1, OC(═X)NJ1J2, NJ3C(═X)NJ1J2 or CN; wherein each J1, J2 and J3 is, independently, H or C₁-C₆ alkyl, and X is 0, S or NJ1. In another embodiment, the Z group is —CH₂Xx, wherein Xx is halo (e.g., fluoro), hydroxyl, alkoxy (e.g., CH₃O—) or azido.

[0744] In certain such embodiments, the Z group is in the (R)-configuration:

[chemical structure]

[0745] In certain such embodiments, the Z group is in the (S)-configuration:

[chemical structure]

[0746] In certain embodiments, each T₁ and T₂ is a hydroxyl protecting group. A preferred list of hydroxyl protecting groups includes benzyl, benzoyl, 2,6-dichlorobenzyl, t-butyldimethylsilyl, t-butyldiphenylsilyl, mesylate, tosylate, dimethoxytrityl (DMT), 9-phenylxanthine-9-yl (Pixyl) and 9-(p-methoxyphenyl)xanthine-9-yl (MOX). In certain embodiments, T₁ is a hydroxyl protecting group selected from acetyl, benzyl, t-butyldimethylsilyl, t-butyldiphenylsilyl and dimethoxytrityl wherein a more preferred hydroxyl protecting group is T₁ is 4,4′-dimethoxytrityl.

[0747] In certain embodiments, T₂ is a reactive phosphorus group wherein preferred reactive phosphorus groups include diisopropylcyanoethoxy phosphoramidite and H-phosphonate. In certain embodiments T₁ is 4,4′-dimethoxytrityl and T₂ is diisopropylcyanoethoxy phosphoramidite.

[0748] In certain embodiments, the dsRNA agent comprises at least one monomer of the formula:

[chemical structure]

or of the formula:

[chemical structure]

or of the formula:

[chemical structure]

[0749] wherein
[0750] Bx is a heterocyclic base moiety;
[0751] T₃ is H, a hydroxyl protecting group, a linked conjugate group or an internucleoside linking group attached to a nucleoside, a nucleotide, an oligonucleoside, an oligonucleotide, a monomeric subunit or an oligomeric compound;
[0752] T₄ is H, a hydroxyl protecting group, a linked conjugate group or an internucleoside linking group attached to a nucleoside, a nucleotide, an oligonucleoside, an oligonucleotide, a monomeric subunit or an oligomeric compound;
[0753] wherein at least one of T₃ and T₄ is an internucleoside linking group attached to a nucleoside, a nucleotide, an oligonucleoside, an oligonucleotide, a monomeric subunit or an oligomeric compound; and
[0754] Z is C₁-C₆ alkyl, C₂-C₆ alkenyl, C₂-C₆ alkynyl, substituted C₁-C₆ alkyl, substituted C₂-C₆ alkenyl, substituted C₂-C₆ alkynyl, acyl, substituted acyl, or substituted amide.

[0755] In some embodiments, each of the substituted groups, is, independently, mono or poly substituted with optionally protected substituent groups independently selected from halogen, oxo, hydroxyl, OJ1, NJ1J2, SJ1, N3, OC(═X)J1, OC(═X)NJ1J2, NJ3C(═X)NJ1J2 and CN, wherein each J1, J2 and J3 is, independently, H or C1-C6 alkyl, and X is 0, S or NJ1.

[0756] In some embodiments, each of the substituted groups, is, independently, mono or poly substituted with substituent groups independently selected from halogen, oxo, hydroxyl, OJ1, NJ1J2, SJ1, N3, OC(═X)J1, and NJ3C(═X)NJ1J2, wherein each J1, J2 and J3 is, independently, H or C₁-C₆ alkyl, and X is 0 or NJ1.

[0757] In certain such embodiments, at least one Z is C₁-C₆ alkyl or substituted C₁-C₆ alkyl. In certain embodiments, each Z is, independently, C₁-C₆ alkyl or substituted C₁-C₆ alkyl. In certain embodiments, at least one Z is C₁-C₆ alkyl. In certain embodiments, each Z is, independently, C₁-C₆ alkyl. In certain embodiments, at least one Z is methyl. In certain embodiments, each Z is methyl. In certain embodiments, at least one Z is ethyl. In certain embodiments, each Z is ethyl. In certain embodiments, at least one Z is substituted C₁-C₆ alkyl. In certain embodiments, each Z is, independently, substituted C₁-C₆ alkyl. In certain embodiments, at least one Z is substituted methyl. In certain embodiments, each Z is substituted methyl. In certain embodiments, at least one Z is substituted ethyl. In certain embodiments, each Z is substituted ethyl.

[0758] In certain embodiments, at least one substituent group is C₁-C₆ alkoxy (e.g., at least one Z is C₁-C₆ alkyl substituted with one or more C₁-C₆ alkoxy). In another embodiment, each substituent group is, independently, C₁-C₆ alkoxy (e.g., each Z is, independently, C₁-C₆ alkyl substituted with one or more C₁-C₆ alkoxy).

[0759] In certain embodiments, at least one C₁-C₆ alkoxy substituent group is CH₃O— (e.g., at least one Z is CH₃OCH₂—). In another embodiment, each C₁-C₆ alkoxy substituent group is CH₃O— (e.g., each Z is CH₃OCH₂—).

[0760] In certain embodiments, at least one substituent group is halogen (e.g., at least one Z is C₁-C₆ alkyl substituted with one or more halogen). In certain embodiments, each substituent group is, independently, halogen (e.g., each Z is, independently, C₁-C₆ alkyl substituted with one or more halogen). In certain embodiments, at least one halogen substituent group is fluoro (e.g., at least one Z is CH₂FCH₂—, CHF₂CH₂— or CF₃CH₂—). In certain embodiments, each halo substituent group is fluoro (e.g., each Z is, independently, CH₂FCH₂—, CHF₂CH₂— or CF₃CH₂—).

[0761] In certain embodiments, at least one substituent group is hydroxyl (e.g., at least one Z is C1-C6 alkyl substituted with one or more hydroxyl). In certain embodiments, each substituent group is, independently, hydroxyl (e.g., each Z is, independently, C1-C6 alkyl substituted with one or more hydroxyl). In certain embodiments, at least one Z is HOCH₂—. In another embodiment, each Z is HOCH₂—.

[0762] In certain embodiments, at least one Z is CH₃—, CH₃CH₂—, CH₂OCH₃—, CH₂F— or HOCH₂—. In certain embodiments, each Z is, independently, CH₃—, CH₃CH₂—, CH₂OCH₃—, CH₂F— or HOCH₂—.

[0763] In certain embodiments, at least one Z group is C₁-C₆ alkyl substituted with one or more Xx, wherein each Xx is, independently, OJ1, NJ1J2, SJ1, N3, OC(═X)J1, OC(═X)NJ1J2, NJ3C(═X)NJ1J2 or CN; wherein each J1, J2 and J3 is, independently, H or C₁-C₆ alkyl, and X is 0, S or NJ1. In another embodiment, at least one Z group is C₁-C₆ alkyl substituted with one or more Xx, wherein each Xx is, independently, halo (e.g., fluoro), hydroxyl, alkoxy (e.g., CH₃O—) or azido.

[0764] In certain embodiments, each Z group is, independently, C₁-C₆ alkyl substituted with one or more Xx, wherein each Xx is independently OJ1, NJ1J2, SJ1, N3, OC(═X)J1, OC(═X)NJ1J2, NJ3C(═X)NJ1J2 or CN; wherein each J1, J2 and J3 is, independently, H or C₁-C₆ alkyl, and X is 0, S or NJ1. In another embodiment, each Z group is, independently, C₁-C₆ alkyl substituted with one or more Xx, wherein each Xx is independently halo (e.g., fluoro), hydroxyl, alkoxy (e.g., CH₃O—) or azido.

[0765] In certain embodiments, at least one Z group is CH₂Xx, wherein Xx is OJ1, NJ1J2, SJ1, N3, OC(═X)J1, OC(═X)NJ1J2, NJ3C(═X)NJ1J2 or CN; wherein each J1, J2 and J3 is, independently, H or C₁-C₆ alkyl, and X is 0, S or NJ1 In certain embodiments, at least one Z group is —CH₂Xx, wherein Xx is halo (e.g., fluoro), hydroxyl, alkoxy (e.g., CH₃O—) or azido.

[0766] In certain embodiments, each Z group is, independently, —CH₂Xx, wherein each Xx is, independently, OJ1, NJ1J2, SJ1, N3, OC(═X)J1, OC(═X)NJ1J2, NJ3C(═X)NJ1J2 or CN; wherein each J1, J2 and J3 is, independently, H or C₁-C₆ alkyl, and X is O, S or NJ1. In another embodiment, each Z group is, independently, —CH₂Xx, wherein each Xx is, independently, halo (e.g., fluoro), hydroxyl, alkoxy (e.g., CH₃O—) or azido.

[0767] In some embodiments, at least one Z is CH₃—. In one embodiment, each Z is CH₃—.

[0768] In some embodiments, the Z group of at least one monomer is in the (R)-configuration represented by the formula:

[chemical structure]

or the formula:

[chemical structure]

or the formula:

[chemical structure]

[0769] IN certain embodiments, the Z group of each monomer of the formula is in the (R)-configuration.

[0770] In certain embodiments, the Z group of at least one monomer is in the (S) configuration represented by the formula:

[chemical structure]

or the formula:

[chemical structure]

or the formula:

[chemical structure]

[0771] In certain embodiments, the Z group of each monomer of the formula is in the (S)-configuration.

[0772] In certain embodiments, T₃ is H or a hydroxyl protecting group. In certain embodiments, T₄ is H or a hydroxyl protecting group. In a further embodiment T₃ is an internucleoside linking group attached to a nucleoside, a nucleotide or a monomeric subunit. In certain embodiments, T₄ is an internucleoside linking group attached to a nucleoside, a nucleotide or a monomeric subunit. In certain embodiments, T₃ is an internucleoside linking group attached to an oligonucleoside or an oligonucleotide. In certain embodiments, T₄ is an internucleoside linking group attached to an oligonucleoside or an oligonucleotide. In certain embodiments, T₃ is an internucleoside linking group attached to an oligomeric compound. In certain embodiments, T₄ is an internucleoside linking group attached to an oligomeric compound. In certain embodiments, at least one of T₃ and T₄ comprises an internucleoside linking group selected from phosphodiester or phosphorothioate.

[0773] In certain embodiments, the dsRNA agent comprises at least one region of at least two contiguous monomers of the formula:

[chemical structure]

or of the formula:

[chemical structure]

or of the formula:

[chemical structure]

[0774] In certain such embodiments, LNAs include, but are not limited to, (A) α-L-Methyleneoxy (4′-CH₂—O-2′) LNA, (B) β-D-Methyleneoxy (4′-CH₂—O-2′) LNA, (C) Ethyleneoxy (4′-(CH₂)₂—O-2′) LNA, (D) Aminooxy (4′-CH₂—O—N(R)-2′) LNA and (E) Oxyamino (4′-CH₂—N(R)—O-2′) LNA, as depicted below:

[chemical structure]

[0775] In certain embodiments, the dsRNA agent comprises at least two regions of at least two contiguous monomers of the above formula. In certain embodiments, the dsRNA agent comprises a gapped motif. In certain embodiments, the dsRNA agent comprises at least one region of from about 8 to about 14 contiguous β-D-2′-deoxyribofuranosyl nucleosides. In certain embodiments, the DsRNA agent comprises at least one region of from about 9 to about 12 contiguous β-D-2′-deoxyribofuranosyl nucleosides.

[0776] In certain embodiments, the dsRNA agent comprises at least one (e.g., 1, 2, 3, 4, 5, 6, 7, 8, 9, 10, 11, 12, 13, 14, 15 or more) comprises at least one (S)-cEt monomer of the formula:

[chemical structure]

wherein Bx is heterocyclic base moiety.

[0777] In certain embodiments, monomers include sugar mimetics. In certain such embodiments, a mimetic is used in place of the sugar or sugar-internucleoside linkage combination, and the nucleobase is maintained for hybridization to a selected target. Representative examples of a sugar mimetics include, but are not limited to, cyclohexenyl or morpholino. Representative examples of a mimetic for a sugar-internucleoside linkage combination include, but are not limited to, peptide nucleic acids (PNA) and morpholino groups linked by uncharged achiral linkages. In some instances a mimetic is used in place of the nucleobase. Representative nucleobase mimetics are well known in the art and include, but are not limited to, tricyclic phenoxazine analogs and universal bases (Berger et al., Nuc Acid Res. 2000, 28:2911-14, incorporated herein by reference). Methods of synthesis of sugar, nucleoside and nucleobase mimetics are well known to those skilled in the art.

### Nucleic Acid Modifications (Intersugar Linkage)

[0778] Described herein are linking groups that link monomers (including, but not limited to, modified and unmodified nucleosides and nucleotides) together, thereby forming an oligomeric compound, e.g., an oligonucleotide. Such linking groups are also referred to as intersugar linkage. The two main classes of linking groups are defined by the presence or absence of a phosphorus atom. Representative phosphorus containing linkages include, but are not limited to, phosphodiesters (P═O), phosphotriesters, methylphosphonates, phosphoramidate, and phosphorothioates (P═S). Representative non-phosphorus containing linking groups include, but are not limited to, methylenemethylimino (—CH₂—N(CH₃)—O—CH2-), thiodiester (—O—C(O)—S—), thionocarbamate (—O—C(O)(NH)—S—); siloxane (—O—Si(H)₂—O—); and N,N′-dimethylhydrazine (—CH₂—N(CH₃)—N(CH₃)—). Modified linkages, compared to natural phosphodiester linkages, can be used to alter, typically increase, nuclease resistance of the oligonucleotides. In certain embodiments, linkages having a chiral atom can be prepared as racemic mixtures, as separate enantomers. Representative chiral linkages include, but are not limited to, alkylphosphonates and phosphorothioates. Methods of preparation of phosphorous-containing and non-phosphorous-containing linkages are well known to those skilled in the art.

[0779] The phosphate group in the linking group can be modified by replacing one of the oxygens with a different substituent. One result of this modification can be increased resistance of the oligonucleotide to nucleolytic breakdown. Examples of modified phosphate groups include phosphorothioate, phosphoroselenates, borano phosphates, borano phosphate esters, hydrogen phosphonates, phosphoroamidates, alkyl or aryl phosphonates and phosphotriesters. In some embodiments, one of the non-bridging phosphate oxygen atoms in the linkage can be replaced by any of the following: S, Se, BR₃ (R is hydrogen, alkyl, aryl), C (i.e. an alkyl group, an aryl group, etc. . . . ), H, NR₂ (R is hydrogen, optionally substituted alkyl, aryl), or OR (R is optionally substituted alkyl or aryl). The phosphorous atom in an unmodified phosphate group is achiral. However, replacement of one of the non-bridging oxygens with one of the above atoms or groups of atoms renders the phosphorous atom chiral; in other words a phosphorous atom in a phosphate group modified in this way is a stereogenic center. The stereogenic phosphorous atom can possess either the “R” configuration (herein Rp) or the “S” configuration (herein Sp).

[0780] Phosphorodithioates have both non-bridging oxygens replaced by sulfur. The phosphorus center in the phosphorodithioates is achiral which precludes the formation of oligonucleotides diastereomers. Thus, while not wishing to be bound by theory, modifications to both non-bridging oxygens, which eliminate the chiral center, e.g. phosphorodithioate formation, can be desirable in that they cannot produce diastereomer mixtures. Thus, the non-bridging oxygens can be independently any one of O, S, Se, B, C, H, N, or OR (R is alkyl or aryl).

[0781] The phosphate linker can also be modified by replacement of bridging oxygen, (i.e. oxygen that links the phosphate to the sugar of the monomer), with nitrogen (bridged phosphoroamidates), sulfur (bridged phosphorothioates) and carbon (bridged methylenephosphonates). The replacement can occur at the either one of the linking oxygens or at both linking oxygens. When the bridging oxygen is the 3′-oxygen of a nucleoside, replacement with carbon is preferred. When the bridging oxygen is the 5′-oxygen of a nucleoside, replacement with nitrogen is preferred.

[0782] Modified phosphate linkages where at least one of the oxygen linked to the phosphate has been replaced or the phosphate group has been replaced by a non-phosphorous group, are also referred to as “non-phosphodiester intersugar linkage” or “non-phosphodiester linker.”

[0783] In certain embodiments, the phosphate group can be replaced by non-phosphorus containing connectors, e.g. dephospho linkers. Dephospho linkers are also referred to as non-phosphodiester linkers herein. While not wishing to be bound by theory, it is believed that since the charged phosphodiester group is the reaction center in nucleolytic degradation, its replacement with neutral structural mimics should impart enhanced nuclease stability. Again, while not wishing to be bound by theory, it can be desirable, in some embodiment, to introduce alterations in which the charged phosphate group is replaced by a neutral moiety.

[0784] Examples of moieties which can replace the phosphate group include, but are not limited to, amides (for example amide-3 (3′-CH₂—C(═O)—N(H)-5′) and amide-4 (3′-CH₂—N(H)—C(═O)-5′)), hydroxylamino, siloxane (dialkylsiloxxane), carboxamide, carbonate, carboxymethyl, carbamate, carboxylate ester, thioether, ethylene oxide linker, sulfide, sulfonate, sulfonamide, sulfonate ester, thioformacetal (3′-S—CH₂—O-5′), formacetal (3′-O—CH₂—O-5′), oxime, methyleneimino, methykenecarbonylamino, methylenemethylimino (MMI, 3′-CH₂—N(CH₃)—O-5′), methylenehydrazo, methylenedimethylhydrazo, methyleneoxymethylimino, ethers (C3′-O—C5′), thioethers (C3′-S—C5′), thioacetamido (C3′-N(H)—C(═O)—CH₂—S—C5′, C3′-O—P(O)—O—SS—C5′, C3′-CH₂—NH—NH—C5′, 3′-NHP(O)(OCH₃)—O-5′ and 3′—NHP(O)(OCH₃)—O-5′ and nonionic linkages containing mixed N, O, S and CH₂ component parts. See for example, Carbohydrate Modifications in Antisense Research; Y. S. Sanghvi and P.D. Cook Eds. ACS Symposium Series 580; Chapters 3 and 4, (pp. 40-65). Preferred embodiments include methylenemethylimino (MMI),methylenecarbonylamino, amides, carbamate and ethylene oxide linker.

[0785] One skilled in the art is well aware that in certain instances replacement of a non-bridging oxygen can lead to enhanced cleavage of the intersugar linkage by the neighboring 2′-OH, thus in many instances, a modification of a non-bridging oxygen can necessitate modification of 2′-OH, e.g., a modification that does not participate in cleavage of the neighboring intersugar linkage, e.g., arabinose sugar, 2′-O-alkyl, 2′-F, LNA and ENA.

[0786] Preferred non-phosphodiester intersugar linkages include phosphorothioates, phosphorothioates with an at least 1%, 5%, 10%, 20%, 30%, 40%, 50%, 60%, 70%, 80%, 90% 95% or more enantiomeric excess of Sp isomer, phosphorothioates with an at least 1%, 5%, 10%, 20%, 30%, 40%, 50%, 60%, 70%, 80%, 90% 95% or more enantiomeric excess of Rp isomer, phosphorodithioates, phosphotriesters, aminoalkylphosphotrioesters, alkyl-phosphonaters (e.g., methyl-phosphonate), selenophosphates, phosphoramidates (e.g., N-alkylphosphoramidate), and boranophosphonates.

[0787] In some embodiments, the dsRNA agent comprises at least one (e.g., 1, 2, 3, 4, 5, 6, 7, 8, 9, 10, 11, 12, 13, 14, 15 or more and up to including all) modified or non-phosphodiester linkages. In some embodiments, the dsRNA agent comprises at least one (e.g., 1, 2, 3, 4, 5, 6, 7, 8, 9, 10, 11, 12, 13, 14, 15 or more and up to including all) phosphorothioate linkages. In some embodiments, the dsRNA agent comprises at least one (e.g., 1, 2, 3, 4, 5, 6, 7, 8, 9, 10, 11, 12, 13, 14, 15 or more and up to including all) phosphorodithioates linkages.

[0788] The dsRNA agent can also be constructed wherein the phosphate linker and the sugar are replaced by nuclease resistant nucleoside or nucleotide surrogates. While not wishing to be bound by theory, it is believed that the absence of a repetitively charged backbone diminishes binding to proteins that recognize polyanions (e.g. nucleases). Again, while not wishing to be bound by theory, it can be desirable in some embodiment, to introduce alterations in which the bases are tethered by a neutral surrogate backbone. Examples include the morpholino, cyclobutyl, pyrrolidine, peptide nucleic acid (PNA), aminoethylglycyl PNA (aegPNA) and backnone-extended pyrrolidine PNA (bepPNA) nucleoside surrogates. A preferred surrogate is a PNA surrogate.

[0789] The dsRNA agent described herein can contain one or more asymmetric centers and thus give rise to enantiomers, diastereomers, and other stereoisomeric configurations that may be defined, in terms of absolute stereochemistry, as (R) or (S), such as for sugar anomers, or as (D) or (L) such as for amino acids et al. Included in the dsRNA agent provided herein are all such possible isomers, as well as their racemic and optically pure forms.

### Nucleic Acid Modifications (Terminal Modifications

[0790] In some embodiments, the dsRNA agent further comprises a phosphate or phosphate mimic at the 5′-end of the antisense strand. In one embodiment, the phosphate mimic is a 5′-vinyl phosphonate (VP).

[0791] In some embodiments, the 5′-end of the antisense strand of the dsRNA agent does not contain a 5′-vinyl phosphonate (VP).

[0792] Ends of the dsRNA agent can be modified. Such modifications can be at one end or both ends. For example, the 3′ and/or 5′ ends of an iRNA can be conjugated to other functional molecular entities such as labeling moieties, e.g., fluorophores (e.g., pyrene, TAMRA, fluorescein, Cy3 or Cy5 dyes) or protecting groups (based e.g., on sulfur, silicon, boron or ester). The functional molecular entities can be attached to the sugar through a phosphate group and/or a linker. The terminal atom of the linker can connect to or replace the linking atom of the phosphate group or the C-3′ or C-5′ O, N, S or C group of the sugar. Alternatively, the linker can connect to or replace the terminal atom of a nucleotide surrogate (e.g., PNAs).

[0793] When a linker/phosphate-functional molecular entity-linker/phosphate array is interposed between two strands of a double stranded oligomeric compound, this array can substitute for a hairpin loop in a hairpin-type oligomeric compound.

[0794] Terminal modifications useful for modulating activity include modification of the 5′ end of iRNAs with phosphate or phosphate analogs. In certain embodiments, the 5′ end of an iRNA is phosphorylated or includes a phosphoryl analog. Exemplary 5′-phosphate modifications include those which are compatible with RISC mediated gene silencing. Modifications at the 5′-terminal end can also be useful in stimulating or inhibiting the immune system of a subject. In some embodiments, the 5′-end of the oligomeric compound comprises the modification

[chemical structure]

wherein W, X and Y are each independently selected from the group consisting of O, OR (R is hydrogen, alkyl, aryl), S, Se, BR₃ (R is hydrogen, alkyl, aryl), BH₃⁻, C (i.e. an alkyl group, an aryl group, etc. . . . ), H, NR₂ (R is hydrogen, alkyl, aryl), or OR (R is hydrogen, alkyl or aryl); A and Z are each independently for each occurrence absent, O, S, CH₂, NR (R is hydrogen, alkyl, aryl), or optionally substituted alkylene, wherein backbone of the alkylene can comprise one or more of O, S, SS and NR (R is hydrogen, alkyl, aryl) internally and/or at the end; and n is 0-2. In some embodiments, n is 1 or 2. It is understood that A is replacing the oxygen linked to 5′ carbon of sugar. When n is 0, W and Y together with the P to which they are attached can form an optionally substituted 5-8 membered heterocyclic, wherein W an Y are each independently O, S, NR′ or alkylene. Preferably the heterocyclic is substituted with an aryl or heteroaryl. In some embodiments, one or both hydrogen on C5′ of the 5′-terminal nucleotides are replaced with a halogen, e.g., F.

[0795] Exemplary 5′-modifications include, but are not limited to, 5′-monophosphate ((HO)₂(O)P—O-5′); 5′-diphosphate ((HO)₂(O)P—O—P(HO)(O)—O-5′); 5′-triphosphate ((HO)₂(O)P—O—(HO)(O)P—O—P(HO)(O)—O-5′); 5′-monothiophosphate (phosphorothioate; (HO)2(S)P—O-5′); 5′-monodithiophosphate (phosphorodithioate; (HO)(HS)(S)P—O-5′), 5′-phosphorothiolate ((HO)2(O)P—S-5′); 5′-alpha-thiotriphosphate; 5′-beta-thiotriphosphate; 5′-gamma-thiotriphosphate; 5′-phosphoramidates ((HO)₂(O)P—NH-5′, (HO)(NH₂)(O)P—O-5′). Other 5′-modification include 5′-alkylphosphonates (R(OH)(O)P—O-5′, R=alkyl, e.g., methyl, ethyl, isopropyl, propyl, etc. . . . ,), 5′-alkyletherphosphonates (R(OH)(O)P—O-5′, R=alkylether, e.g., methoxymethyl (CH₂OMe), ethoxymethyl, etc. . . . ). Other exemplary 5′-modifications include where Z is optionally substituted alkyl at least once, e.g., ((HO)₂(X)P—O[—(CH₂)ₐ—O—P(X)(OH)—O]_{b}— 5′, ((HO)₂(X)P—O[—(CH₂)ₐ—P(X)(OH)—O]_{b}— 5′, ((HO)2(X)P—[—(CH₂)ₐ—O—P(X)(OH)—O]_{b}— 5′; dialkyl terminal phosphates and phosphate mimics: HO[—(CH₂)ₐ—O—P(X)(OH)—O]_{b}— 5′, H₂N[—(CH₂)ₐ—O—P(X)(OH)—O]_{b}— 5′, H[—(CH₂)ₐ—O—P(X)(OH)—O]_{b}— 5′, Me₂N[—(CH₂)ₐ—O—P(X)(OH)—O]_{b}— 5′, HO[—(CH₂)ₐ—P(X)(OH)—O]_{b}— 5′, H₂N[—(CH₂)ₐ—P(X)(OH)—O]_{b}— 5′, H[—(CH₂)ₐ—P(X)(OH)—O]_{b}— 5′, Me₂N[—(CH₂)ₐ—P(X)(OH)—O]_{b}— 5′, wherein a and b are each independently 1-10. Other embodiments, include replacement of oxygen and/or sulfur with BH₃, BH₃⁻ and/or Se.

[0796] Terminal modifications can also be useful for monitoring distribution, and in such cases the preferred groups to be added include fluorophores, e.g., fluorescein or an Alexa dye, e.g., Alexa 488. Terminal modifications can also be useful for enhancing uptake, useful modifications for this include targeting ligands. Terminal modifications can also be useful for cross-linking an oligonucleotide to another moiety; modifications useful for this include mitomycin C, psoralen, and derivatives thereof.

### Thermally Destabilizing Modifications

[0797] The dsRNA agent, such as iRNAs or dsRNA agents, can be optimized for RNA interference by increasing the propensity of the iRNA duplex to disassociate or melt (decreasing the free energy of duplex association) by introducing a thermally destabilizing modification in the sense strand at a site opposite to the seed region of the antisense strand (i.e., at positions 2-8 of the 5′-end of the antisense strand). This modification can increase the propensity of the duplex to disassociate or melt in the seed region of the antisense strand.

[0798] The thermally destabilizing modifications can include abasic modification; mismatch with the opposing nucleotide in the opposing strand; and sugar modification such as 2′-deoxy modification or acyclic nucleotide, e.g., unlocked nucleic acids (UNA) or glycerol nuceltic acid (GNA).

[0799] Exemplified abasic modifications are:

[chemical structure]

[0800] Exemplified sugar modifications are:

[chemical structure]

[0801] The term “acyclic nucleotide” refers to any nucleotide having an acyclic ribose sugar, for example, where any of bonds between the ribose carbons (e.g., C1′-C2′, C2′-C3′, C3′-C4′, C4′-04′, or C1′-04′) is absent and/or at least one of ribose carbons or oxygen (e.g., C1′, C2′, C3′, C4′ or 04′) are independently or in combination absent from the nucleotide. In some embodiments, acyclic nucleotide is

[chemical structure]

wherein B is a modified or unmodified nucleobase, R¹ and R² independently are H, halogen, OR₃, or alkyl; and R₃ is H, alkyl, cycloalkyl, aryl, aralkyl, heteroaryl or sugar). The term “UNA” refers to unlocked acyclic nucleic acid, wherein any of the bonds of the sugar has been removed, forming an unlocked “sugar” residue. In one example, UNA also encompasses monomers with bonds between C1′-C4′ being removed (i.e. the covalent carbon-oxygen-carbon bond between the C1′ and C4′ carbons). In another example, the C2′-C3′ bond (i.e. the covalent carbon-carbon bond between the C2′ and C3′ carbons) of the sugar is removed (see Mikhailov et. al., Tetrahedron Letters, 26 (17): 2059 (1985); and Fluiter et al., Mol. Biosyst., 10: 1039 (2009), which are hereby incorporated by reference in their entirety). The acyclic derivative provides greater backbone flexibility without affecting the Watson-Crick pairings. The acyclic nucleotide can be linked via 2′-5′ or 3′-5′ linkage.

[0802] The term ‘GNA’ refers to glycol nucleic acid which is a polymer similar to DNA or RNA but differing in the composition of its “backbone” in that is composed of repeating glycerol units linked by phosphodiester bonds:

[chemical structure]

[0803] The thermally destabilizing modification can be mismatches (i.e., noncomplementary base pairs) between the thermally destabilizing nucleotide and the opposing nucleotide in the opposite strand within the dsRNA duplex. Exemplary mismatch basepairs include G:G, G:A, G:U, G:T, A:A, A:C, C:C, C:U, C:T, U:U, T:T, U:T, or a combination thereof. Other mismatch base pairings known in the art are also amenable to the present invention. A mismatch can occur between nucleotides that are either naturally occurring nucleotides or modified nucleotides, i.e., the mismatch base pairing can occur between the nucleobases from respective nucleotides independent of the modifications on the ribose sugars of the nucleotides. In certain embodiments, the compounds of the invention, such as siRNA or iRNA agent, contains at least one nucleobase in the mismatch pairing that is a 2′-deoxy nucleobase; e.g., the 2′-deoxy nucleobase is in the sense strand.

[0804] More examples of abasic nucleotide, acyclic nucleotide modifications (including UNA and GNA), and mismatch modifications have been described in detail in WO 2011/133876, which is herein incorporated by reference in its entirety.

[0805] The thermally destabilizing modifications may also include universal base with reduced or abolished capability to form hydrogen bonds with the opposing bases, and phosphate modifications.

[0806] Nucleobase modifications with impaired or completely abolished capability to form hydrogen bonds with bases in the opposite strand have been evaluated for destabilization of the central region of the dsRNA duplex as described in WO 2010/0011895, which is herein incorporated by reference in its entirety. Exemplary nucleobase modifications are:

[chemical structure]

[0807] Exemplary phosphate modifications known to decrease the thermal stability of dsRNA duplexes compared to natural phosphodiester linkages are:

[chemical structure]

[0808] In some embodiments, the dsRNA agent can comprise 2′-5′ linkages (with 2′-H, 2′-OH and 2′-OMe and with P═O or P═S). For example, the 2′-5′ linkages modifications can be used to promote nuclease resistance or to inhibit binding of the sense to the antisense strand, or can be used at the 5′ end of the sense strand to avoid sense strand activation by RISC.

[0809] In another embodiment, the dsRNA agent can comprise L sugars (e.g., L ribose, L-arabinose with 2′-H, 2′-OH and 2′-OMe). For example, these L sugar modifications can be used to promote nuclease resistance or to inhibit binding of the sense to the antisense strand, or can be used at the 5′ end of the sense strand to avoid sense strand activation by RISC.

[0810] In one embodiment, the dsRNA agent is conjugated to a ligand via a carrier, wherein the carrier can be cyclic group or acyclic group; preferably, the cyclic group is selected from pyrrolidinyl, pyrazolinyl, pyrazolidinyl, imidazolinyl, imidazolidinyl, piperidinyl, piperazinyl, [1,3]dioxolane, oxazolidinyl, isoxazolidinyl, morpholinyl, thiazolidinyl, isothiazolidinyl, quinoxalinyl, pyridazinonyl, tetrahydrofuryl and decalin; preferably, the acyclic group is selected from serinol backbone or diethanolamine backbone.

[0811] In some embodiments, at least one strand of the dsRNA agent disclosed herein is 5′ phosphorylated or includes a phosphoryl analog at the 5′ prime terminus. 5′-phosphate modifications include those which are compatible with RISC mediated gene silencing. Suitable modifications include: 5′-monophosphate ((HO)₂(O)P—O-5′); 5′-diphosphate ((HO)₂(O)P—O—P(HO)(O)—O-5′); 5′-triphosphate ((HO)₂(O)P—O—(HO)(O)P—O—P(HO)(O)—O-5′); 5′-guanosine cap (7-methylated or non-methylated) (7m-G-O-5′-(HO)(O)P—O—(HO)(O)P—O—P(HO)(O)—O-5′); 5′-adenosine cap (Appp), and any modified or unmodified nucleotide cap structure (N—O-5′-(HO)(O)P—O—(HO)(O)P—O—P(HO)(O)—O-5′); 5′-monothiophosphate (phosphorothioate; (HO)₂(S)P—O-5′); 5′-monodithiophosphate (phosphorodithioate; (HO)(HS)(S)P—O-5′), 5′-phosphorothiolate ((HO)₂(O)P—S-5′); any additional combination of oxygen/sulfur replaced monophosphate, diphosphate and triphosphates (e.g. 5′-alpha-thiotriphosphate, 5′-gamma-thiotriphosphate, etc.), 5′-phosphoramidates ((HO)₂(O)P—NH-5′, (HO)(NH2)(O)P—O-5′), 5′-alkylphosphonates (R=alkyl=methyl, ethyl, isopropyl, propyl, etc., e.g. RP(OH)(O)—O-5′-, 5′-alkenylphosphonates (i.e. vinyl, substituted vinyl), (OH)₂(O)P-5′-CH₂—), 5′-alkyletherphosphonates (R=alkylether=methoxymethyl (MeOCH2-), ethoxymethyl, etc., e.g. RP(OH)(O)—O-5′-).

### Target Genes

[0812] Without limitations, target genes for siRNAs include, but are not limited to genes promoting unwanted cell proliferation, growth factor gene, growth factor receptor gene, genes expressing kinases, an adaptor protein gene, a gene encoding a G protein super family molecule, a gene encoding a transcription factor, a gene which mediates angiogenesis, a viral gene, a gene required for viral replication, a cellular gene which mediates viral function, a gene of a bacterial pathogen, a gene of an amoebic pathogen, a gene of a parasitic pathogen, a gene of a fungal pathogen, a gene which mediates an unwanted immune response, a gene which mediates the processing of pain, a gene which mediates a neurological disease, an allene gene found in cells characterized by loss of heterozygosity, or one allege gene of a polymorphic gene.

[0813] Specific exemplary target genes for the siRNAs include, but are not limited to, PCSK-9, ApoC3, AT3, AGT, ALAS1, TMPR, HAO1, AGT, C5, CCR-5, PDGF beta gene; Erb-B gene, Src gene; CRK gene; GRB2 gene; RAS gene; MEKK gene; INK gene; RAF gene; Erk1/2 gene; PCNA(p21) gene; MYB gene; c-MYC gene; JUN gene; FOS gene; BCL-2 gene; Cyclin D gene; VEGF gene; EGFR gene; Cyclin A gene; Cyclin E gene; WNT-1 gene; beta-catenin gene; c-MET gene; PKC gene; NFKB gene; STAT3 gene; survivin gene; Her2/Neu gene; topoisomerase I gene; topoisomerase II alpha gene; p73 gene; p21(WAF1/CIP1) gene, p27(KIP1) gene; PPM1D gene; caveolin I gene; MIB I gene; MTAI gene; M68 gene; tumor suppressor genes; p53 gene; DN-p63 gene; pRb tumor suppressor gene; APC1 tumor suppressor gene; BRCA1 tumor suppressor gene; PTEN tumor suppressor gene; MLL fusion genes, e.g., MLL-AF9, BCR/ABL fusion gene; TEL/AML1 fusion gene; EWS/FLI1 fusion gene; TLS/FUS1 fusion gene; PAX3/FKHR fusion gene; AML1/ETO fusion gene; alpha v-integrin gene; Flt-1 receptor gene; tubulin gene; Human Papilloma Virus gene, a gene required for Human Papilloma Virus replication, Human Immunodeficiency Virus gene, a gene required for Human Immunodeficiency Virus replication, Hepatitis A Virus gene, a gene required for Hepatitis A Virus replication, Hepatitis B Virus gene, a gene required for Hepatitis B Virus replication, Hepatitis C Virus gene, a gene required for Hepatitis C Virus replication, Hepatitis D Virus gene, a gene required for Hepatitis D Virus replication, Hepatitis E Virus gene, a gene required for Hepatitis E Virus replication, Hepatitis F Virus gene, a gene required for Hepatitis F Virus replication, Hepatitis G Virus gene, a gene required for Hepatitis G Virus replication, Hepatitis H Virus gene, a gene required for Hepatitis H Virus replication, Respiratory Syncytial Virus gene, a gene that is required for Respiratory Syncytial Virus replication, Herpes Simplex Virus gene, a gene that is required for Herpes Simplex Virus replication, herpes Cytomegalovirus gene, a gene that is required for herpes Cytomegalovirus replication, herpes Epstein Barr Virus gene, a gene that is required for herpes Epstein Barr Virus replication, Kaposi's Sarcoma-associated Herpes Virus gene, a gene that is required for Kaposi's Sarcoma-associated Herpes Virus replication, JC Virus gene, human gene that is required for JC Virus replication, myxovirus gene, a gene that is required for myxovirus gene replication, rhinovirus gene, a gene that is required for rhinovirus replication, coronavirus gene, a gene that is required for coronavirus replication, West Nile Virus gene, a gene that is required for West Nile Virus replication, St. Louis Encephalitis gene, a gene that is required for St. Louis Encephalitis replication, Tick-borne encephalitis virus gene, a gene that is required for Tick-borne encephalitis virus replication, Murray Valley encephalitis virus gene, a gene that is required for Murray Valley encephalitis virus replication, dengue virus gene, a gene that is required for dengue virus gene replication, Simian Virus 40 gene, a gene that is required for Simian Virus 40 replication, Human T Cell Lymphotropic Virus gene, a gene that is required for Human T Cell Lymphotropic Virus replication, Moloney-Murine Leukemia Virus gene, a gene that is required for Moloney-Murine Leukemia Virus replication, encephalomyocarditis virus gene, a gene that is required for encephalomyocarditis virus replication, measles virus gene, a gene that is required for measles virus replication, Vericella zoster virus gene, a gene that is required for Vericella zoster virus replication, adenovirus gene, a gene that is required for adenovirus replication, yellow fever virus gene, a gene that is required for yellow fever virus replication, poliovirus gene, a gene that is required for poliovirus replication, poxvirus gene, a gene that is required for poxvirus replication, plasmodium gene, a gene that is required for plasmodium gene replication, Mycobacterium ulcerans gene, a gene that is required for Mycobacterium ulcerans replication, Mycobacterium tuberculosis gene, a gene that is required for Mycobacterium tuberculosis replication, Mycobacterium leprae gene, a gene that is required for Mycobacterium leprae replication, Staphylococcus aureus gene, a gene that is required for Staphylococcus aureus replication, Streptococcus pneumoniae gene, a gene that is required for Streptococcus pneumoniae replication, Streptococcus pyogenes gene, a gene that is required for Streptococcus pyogenes replication, Chlamydia pneumoniae gene, a gene that is required for Chlamydia pneumoniae replication, Mycoplasma pneumoniae gene, a gene that is required for Mycoplasma pneumoniae replication, an integrin gene, a selectin gene, complement system gene, chemokine gene, chemokine receptor gene, GCSF gene, Gro1 gene, Gro2 gene, Gro3 gene, PF4 gene, MIG gene, Pro-Platelet Basic Protein gene, MIP-1I gene, MIP-1J gene, RANTES gene, MCP-1 gene, MCP-2 gene, MCP-3 gene, CMBKR1 gene, CMBKR2 gene, CMBKR3 gene, CMBKR5v, AIF-1 gene, I-309 gene, a gene to a component of an ion channel, a gene to a neurotransmitter receptor, a gene to a neurotransmitter ligand, amyloid-family gene, presenilin gene, HD gene, DRPLA gene, SCA1 gene, SCA2 gene, MIDI gene, CACNL1A4 gene, SCA7 gene, SCA8 gene, allele gene found in loss of heterozygosity (LOH) cells, one allele gene of a polymorphic gene and combinations thereof.

[0814] The loss of heterozygosity (LOH) can result in hemizygosity for sequence, e.g., genes, in the area of LOH. This can result in a significant genetic difference between normal and disease-state cells, e.g., cancer cells, and provides a useful difference between normal and disease-state cells, e.g., cancer cells. This difference can arise because a gene or other sequence is heterozygous in duploid cells but is hemizygous in cells having LOH. The regions of LOH will often include a gene, the loss of which promotes unwanted proliferation, e.g., a tumor suppressor gene, and other sequences including, e.g., other genes, in some cases a gene which is essential for normal function, e.g., growth. Methods of the invention rely, in part, on the specific modulation of one allele of an essential gene with a composition of the invention.

[0815] In certain embodiments, the invention provides a dsRNA agent that modulates a micro-RNA.

### Targeting CNS

[0816] In some embodiments, the invention provides a dsRNA agent that targets APP for Early Onset Familial Alzheimer Disease, ATXN2 for Spinocerebellar Ataxia 2 and ALS, and C9orf72 for Amyotrophic Lateral Sclerosis and Frontotemporal Dementia.

[0817] In some embodiments, the invention provides a dsRNA agent that targets TARDBP for ALS, MAPT (Tau) for Frontotemporal Dementia, and HTT for Huntington Disease.

[0818] In some embodiments, the invention provides a dsRNA agent that targets SNCA for Parkinson Disease, FUS for ALS, ATXN3 for Spinocerebellar Ataxia 3, ATXN1 for SCA1, genes for SCA7 and SCA8, ATN1 for DRPLA, MeCP2 for XLMR, PRNP for Prion Diseases, recessive CNS disorders: Lafora Disease, DMPK for DM1 (CNS and Skeletal Muscle), and TTR for hATTR (CNS, ocular and systemic).

[0819] Spinocerebellar ataxia is an inherited brain-function disorder. Dominantly inherited forms of spinocerebellar ataxias, such as SCA1-8, are devastating disorders with no disease-modifying therapy. Exemplary targets include SCA2, SCA3, and SCA1.

[0820] Additional exemplary target genes are SCN9A, LRRK2, GPR75, APOE, SCD5, and GSK3α.

### Targeting ATXA2 for SCA2

[0821] Spinocerebellar Ataxia 2 (SCA2), a progressive ataxia, is the second most common SCA. Another disease associated with this target is amyotrophic lateral sclerosis (ALS). These diseases are debilitating and ultimately lethal diseases with no disease-modifying therapy. The prevalence of SCA is 2-6 per 100,000 people; ATXN2 causes 15% of SCA population worldwide and much more SCA populations in some countries, especially in Cuba (40 per 100,000 people). Targeting ATXN2 can be excellent via human molecular genetics, e.g., coding CAG repeat expansion in ATXN2 was discovered in familial and sporadic SCA and ALS, in tissues such as spinal cord, brainstem, or cerebellum. The mechanism of this targeting may be because autosomal dominant coding CAG expansion of ATXN2 causes expression of toxic, misfolded protein and Purkinje cell and neuronal death. The efficacy has been shown by 70% knockdown (KD) of ATXN2 mRNA; and mATXN2 mice KD POC has been demonstrated. With respect to safety, mATXN2 knockout (KO) mice have been reported healthy. Possible diagnosis includes family history; genetic testing; or early symptoms. Biomarkers that can be used include, e.g., CSF CAG mRNA and peptide repeat proteins

### Targeting ATXA3 for SCA3

[0822] Spinocerebellar Ataxia 3 (SCA3), a progressive ataxia, is the most common SCA worldwide. This disease is debilitating and ultimately lethal disease with no disease-modifying therapy. It is the most common cause of SCA and the prevalence of SCA is 2-6 per 100,000 people; ATXN3 causes 21% of SCA population in US and much more in Europe, especially in Portugal. Targeting ATXN3 can be excellent via human molecular genetics, e.g., coding CAG repeat expansion in ATXN3 was discovered in familial and sporadic SCA, in tissues such as spinal cord, brainstem, or cerebellum. The mechanism of this targeting may be because autosomal dominant coding CAG expansion of ATXN3 causes expression of toxic, misfolded protein, Purkinje cell and neuron death. The efficacy has been shown by 70% KD of ATXN3 mRNA; and mATXN3 KD mice POC has been demonstrated. With respect to safety, mATXN3 KO mice have been reported healthy. Possible diagnosis includes family history; genetic testing; or early symptoms. Biomarkers that can be used include, e.g., CSF CAG mRNA and peptide repeat proteins.

### Targeting ATXN1 for SCA1

[0823] Spinocerebellar Ataxia 1 (SCA1), a progressive ataxia, is the first SCA gene discovered in 1993. This disease is debilitating and ultimately lethal disease with no disease-modifying therapy. The prevalence of SCA is 2-6 per 100,000 people; ATXN1 causes 6% of SCA population in US and worldwide, and much more in some countries (25% in Japan), especially in Poland (64%) and Siberia (100%). Targeting ATXN1 can be excellent via human molecular genetics, e.g., coding CAG repeat expansion in ATXN1 was discovered in familial and sporadic SCA, in tissues such as spinal cord, brainstem, or cerebellum. The mechanism of this targeting may be because autosomal dominant coding CAG expansion of ATXN1 causes expression of toxic, misfolded protein, Purkinje cell and neuronal death. The efficacy has been shown by 70% KD of ATXN1 mRNA; and mATXN1 mice POC has been demonstrated. With respect to safety, mATXN1 KO mice have been reported healthy. Possible diagnosis includes family history; genetic testing; or early symptoms. Biomarkers that can be used include, e.g., CSF CAG mRNA and peptide repeat proteins.

### Targeting ATXN7 for SCA7

[0824] Spinocerebellar Ataxia 7 (SCA7) causes progressive ataxia and retinal degeneration. This disease is debilitating and ultimately lethal retinal and cerebellar disorder with no disease-modifying therapy. The prevalence of SCA is 2-6 per 100,000 people; ATXN7 causes 5% of SCA population worldwide, and much more in some countries, especially in South Africa. Targeting ATXN7 can be excellent via human molecular genetics, e.g., coding CAG repeat expansion in ATXN7 discovered in familial and sporadic SCA, in tissues such as spinal cord, brainstem, cerebellum, or retina. The mechanism of this targeting may be because autosomal dominant coding CAG expansion of ATXN1 causes expression of toxic, misfolded protein, inciting cone and rod dystrophy, Purkinje cell and neuronal lethality. The efficacy has been shown by 70% KD of ATXN1 mRNA, via intrathecal (IT) and intravitreal (IVT) administrations. Possible diagnosis includes family history; genetic testing; or early symptoms. Biomarkers that can be used include, e.g., CSF CAG mRNA and peptide repeat proteins.

### Targeting ATXN8 for SCA8

[0825] Spinocerebellar Ataxia 8 (SCA8), a progressive neurodegenerative ataxia is caused by CTG repeat expansion in ATXN8. This disease is debilitating and ultimately lethal disease with no disease-modifying therapy. The prevalence: SCA is 2-6 per 100,000 people; ATXN8 causes 3% of SCA population worldwide, and much more in some countries, especially in Finland. Targeting ATXN8 can be excellent via human molecular genetics, e.g., coding CTG repeat expansion in ATXN8 was discovered in familial and sporadic SCA, in tissues such as spinal cord, brainstem, or cerebellum. The mechanism of this targeting may be because autosomal dominant coding CTG expansion of ATXN8 causes expression of toxic, misfolded protein, inciting Purkinje cell and neuronal lethality. The efficacy has been shown by 70% KD of ATXN8 mRNA. Possible diagnosis includes family history; genetic testing; or early symptoms. Biomarkers that can be used include, e.g., CSF CTG mRNA and peptide repeat proteins.

### Targeting CACNA1A for SCA6

[0826] Spinocerebellar ataxia 6 (SCA6) is a progressive ataxia. This disease is debilitating and ultimately lethal disease with no disease-modifying therapy. The prevalence of SCA is 2-6 per 100,000 people; and CACNA1A causes 15% of SCA population worldwide. Targeting CACNA1A can be excellent via human molecular genetics, e.g., coding CAG repeat expansion in CACNA1A was discovered in familial and sporadic SCA, in tissues such as spinal cord, brainstem, or cerebellum. The mechanism of this targeting may be because autosomal dominant coding CAG expansion of CACNA1A causes expression of toxic, misfolded protein and Purkinje cell and neuronal death. The efficacy has been shown by 70% KD of CACNA1A CAG expansion. Possible diagnosis includes family history; genetic testing; or early symptoms. Biomarkers that can be used include, e.g., CSF CAG mRNA and peptide repeat proteins.

[0827] Exemplary target for inherited polyglutamine disorders includes huntington disease (HD).

### Targeting HTT for Huntington Disease

[0828] Huntington mutations causes HD, a progressive CNS degenerative disease. This disease is debilitating and ultimately lethal disease with no disease-modifying therapy. The prevalence of HD is 5-10 per 100,000 people worldwide, and much more common in certain countries, especially in Venezuela. Targeting HTT can be excellent via human molecular genetics, e.g., coding CAG repeat expansion in HTT discovered in familial and sporadic HD, in tissues such as striatum, or cortex. The mechanism of this targeting may be because autosomal dominant coding CAG expansion of HTT causes expression of toxic, misfolded protein and neuronal death. The efficacy has been shown by 70% KD of HTT CAG expansion only; and murine POC has been demonstrated. With respect to safety, KO of HTT in mice can be lethal; KD in humans has been demonstrated. Possible diagnosis includes family history; genetic testing; early symptoms. Biomarkers that can be used include, e.g., CSF mRNA and peptide repeat proteins.

### Targeting ATN1 for DRPLA

[0829] Atrophin 1 mutations causes dentatorubral-pallidoluysian atrophy (DRPLA), which is a progressive spinocerebellar disorder similar to HD. This disease is debilitating and ultimately lethal disease with no disease-modifying therapy. The prevalence of DRPLA is 2-7 per 1,000,000 people in Japan. Targeting ATN1 can be excellent via human molecular genetics, e.g., coding CAG repeat expansion in ATN1 was discovered in familial and sporadic SCA, in tissues such as spinal cord, brainstem, cerebellum, or cortex. The mechanism of this targeting may be because autosomal dominant coding CAG expansion of ATN1 causes expression of toxic, misfolded protein and neuronal death. The efficacy has been shown by 70% KD of ATN1. With respect to safety, ATN1 KO mice have been reported healthy. Possible diagnosis includes family history; genetic testing; or early symptoms. Biomarkers that can be used include, e.g., CSF CAG mRNA and peptide repeat proteins.

### Targeting AR for Spinal and Bulbar Muscular Atrophy

[0830] Androgen receptor mutations causes spinal and bulbar muscular atrophy (SBMA, Kennedy disease), a progressive muscle wasting disease, and other diseases. This disease is debilitating and ultimately lethal disease with no disease-modifying therapy. The prevalence of SBMA is 2 per 100,000 males; females have a mild phenotype. Targeting AR can be excellent via human molecular genetics, e.g., coding CAG repeat expansion in AR discovered in familial SBMA, in tissues such as spinal cord, or brainstem. The mechanism of this targeting may be because X-linked coding CAG expansion of AR causes toxic gain-or-function and motor neuron lethality. The efficacy has been shown by 70% KD of AR. Possible diagnosis includes family history; genetic testing; or early symptoms. Biomarkers that can be used include, e.g., CSF CAG mRNA and peptide repeat proteins.

### Targeting FXN for Friedrich Ataxia

[0831] Recessive loss of function GAA expansion of FXN causes friedrich ataxia (FA), a progressive degenerative ataxia. This disease is debilitating and ultimately lethal disease with no disease-modifying therapy. The prevalence of FA is 2 per 100,000 people worldwide. Targeting FXN can be excellent via human molecular genetics, e.g., intron GAA repeat expansion in FXN was discovered in familial FA, in tissues such as spinal cord, cerebellum, or perhaps retina and heart. The mechanism of this targeting may be because autosomal recessive non-coding FAA expansion of FXN causes deceased expression of FXN, an important mitochondrial protein. The efficacy has been shown by 70% KD of FXN intron GAS expansion. With respect to safety, KD of intron GAA is safe and effective in mice. Possible diagnosis includes family history; genetic testing; or early symptoms. Biomarkers that can be used include, e.g., CSF mRNA and peptide repeat proteins.

### Targeting FMRI for FXTAS

[0832] Fragile X-associated tremor/ataxia syndrome (FXTAS), a progressive disorder of ataxia and cognitive loss in adults caused by FMR1 overexpression. This disease is debilitating disease with no disease-modifying therapy. The prevalence of FMR1 permutation is 1 in 500 males. Targeting FMR1 can be excellent via human molecular genetics, e.g., coding CCG repeat expansion pre-mutations in FMR1 was discovered in FXTAS, in tissues such as spinal cord, cerebellum, or cortex. The mechanism of this targeting may be because X-linked coding CCG expansion of FMR1 causes toxic mRNA. The efficacy has been shown by 70% KD of toxic mRNA. Possible diagnosis includes family history; genetic testing; or early symptoms. Biomarkers that can be used include, e.g., CSF mRNA and peptide repeat proteins.

Targeting upstream of FMR1 for Fragile X Syndrome

[0833] Fragile X syndrome (FRAXA), a progressive disorder of mental retardation, may be treated by targeting upstream mRNA of FMR1. This disease is debilitating disease with no disease-modifying therapy. The prevalence of FRAXA is 1 per 4,000 males and 1 per 8,000 females. Targeting FMR1 can be excellent via human molecular genetics, e.g., coding CCG repeat expansion in FMR1 was discovered in FRAXA, in tissues such as CNS. The mechanism of this targeting may be because X-linked coding CCG expansion of FMR1 causes LOF; and normal FMR1 functions to transport specific mRNAs from nucleus. The efficacy has been shown by 70% KD of toxic mRNA. Possible diagnosis includes family history; genetic testing; or early symptoms. Biomarkers that can be used include, e.g., CSF mRNA and peptide repeat proteins.

[0834] Dominant Inherited Amyotrophic Lateral Sclerosis is a devastating disorders with no disease-modifying therapy. Exemplary targets include C9orf72, ATXN2 (also causes SCA2), and MAPT.

### Targeting C9orf72 for ALS

[0835] C9orf72 is the most common cause of Amyotrophic Lateral Sclerosis (ALS) and Frontotemporal Dementia (FTD). These diseases are lethal disorders of motor neurons with no disease-modifying therapy. The prevalence of ALS is 2-5 per 100,000 people (10% is familial); C9orf72 causes 39% of familial ALS in US and Europe and 7% of sporadic ALS. Targeting C9orf72 can be excellent via human molecular genetics, e.g., hexa-nucleotide expansion was discovered in familial and sporadic ALS, in tissues such as upper and lower motor neurons (for ALS); or cortex (for FTD). The mechanism of this targeting may be because autosomal dominant hexa-nucleotide expansion causes repeat-associated non-AUG-dependent translation of toxic dipeptide repeat proteins and neuron lethality. The efficacy has been shown by 70% KD of C9orf72. With respect to safety, heterozygous LOF mutations of C9orf72 appear to be safe in humans and mice. Possible diagnosis includes family history; genetic testing; or early symptoms. Biomarkers that can be used include, e.g., CSF hexa-nucleotide repeat mRNAs and dipeptide repeat proteins.

### Targeting TARDBP for ALS

[0836] TARDBP mutations causes ALS and Frontotemporal Dementia (FTD). These diseases are lethal disorders of motor neurons with no disease-modifying therapy. The prevalence of ALS is 2-5 per 100,000 people (10% is familial); TARDBP causes 5% of familial ALS and 1.5% of sporadic ALS. Targeting TARDBP can be excellent via human molecular genetics, e.g., mutations were discovered in familial and sporadic ALS, in tissues such as upper and lower motor neurons (for ALS); or cortex (for FTD). The mechanism of this targeting may be because autosomal dominant TRDBP mutations cause toxic TRDBP protein and neuron lethality. The efficacy has been shown by 70% KD of TARDBP mutant alleles. Possible diagnosis includes family history; genetic testing; or early symptoms. Biomarkers that can be used include, e.g., CSF proteins.

### Targeting FUS for ALS

[0837] FUS mutations causes ALS and FTD. These diseases are lethal disorder of motor neurons with no disease-modifying therapy. The prevalence of ALS is 2-5 per 100,000 people (10% is familial); FUS causes 5% of familial ALS; FUS inclusions are often found in sporadic ALS. Targeting FUS can be excellent via human molecular genetics, e.g., mutations were discovered in familial ALS, in tissues such as upper and lower motor neurons for ALS. The mechanism of this targeting may be because autosomal dominant FUS mutations cause abnormal protein folding and neuron lethality. The efficacy has been shown by 70% KD of FUS mutant alleles. With respect to safety, KO mice struggle but survive and have an ADHD phenotype. Possible diagnosis includes family history; genetic testing; or early symptoms. Biomarkers that can be used include, e.g., CSF proteins.

### Targeting SOD1 for ALS

[0838] Dominant and recessive mutations of SOD1 cause ALS. This disease is lethal disorder of motor neurons with no disease-modifying therapy. The prevalence of ALS is 2-5 per 100,000 people (10% is familial); SOD1 causes 5-20% of familial ALS. Target SOD1 can be excellent via human molecular genetics, e.g., many SOD1 mutations associate with AD and AR ALS in families, in tissues such as upper and lower motor neurons for ALS. The efficacy of this targeting may need mutation-specific KD. Possible diagnosis includes family history; genetic testing; or early symptoms. Biomarkers may be mutation-specific.

[0839] Dominant Inherited Frontotemporal Dementia and Progressive Supra-nuclear Palsy. The targets include MAPT because it may be important for AD, or C9orf72.

Targeting Microtubule-ASSOCIATED protein Tau for FTD-17 and PSP

[0840] Familial Frontotemporal Dementia 17 (FTD-17), a familial form of FTD lined to chromosome 17, and Familial Progressive Supra-nuclear Palsy may be caused by MAPT mutations, which may also cause rare forms of Progressive Supra-nuclear Palsy, Corticobasal Degeneration, Tauopathy with Respiratory Failure, Dementia with Seizures. These diseases are lethal neurodegenerative disorders with no disease-modifying therapy. The prevalence of FTD is 15-22 per 100,000 people; the prevalence of FTD-17 in Netherlands is 1 in 1,000,000 population. Targeting MAPT can be excellent via human molecular genetics, e.g., GOF point and splice site mutations of MAPT were discovered in familial and sporadic FTD, in tissues such as frontal or temporal cortex. The mechanism of this targeting may be because autosomal dominant GOF mutations of MAPT lead to toxic Tau peptides and neuronal death. The efficacy has been shown by 70% KD of MAPT. With respect to safety, MAPT KO mice have been reported healthy. Possible diagnosis includes family history; genetic testing; early symptoms. Biomarkers that can be used include, e.g., CSF Tau mRNAs and proteins.

### Targeting Sequestosome 1 for FTD and ALS

[0841] Sporadic FTD/ALS associate with dominant SQSTM1 mutations. This disease is lethal neurodegenerative disorder with no disease-modifying therapy. This is a very rare disease. Targeting Sequestosome 1 is reasonable via human molecular genetic association in sporadic cases, in tissues such as frontal and temporal cortex, or cerebellum and spinal cord. Possible diagnosis includes genetic testing; early symptoms.

[0842] Dominant Inherited Parkinson Disease is a devastating disorders with no disease-modifying therapy. The targets include SNCA.

### Targeting SNCA for Parkinson Disease

[0843] Alpha Synuclein mutations causes familial Parkinson disease (PD) and Lewy body dementia. These diseases are lethal neurodegenerative disorders with no disease-modifying therapy. The prevalence of PD is 4 million worldwide; ⅓ of PD is familial; 1% of fPD is caused by SNCA. Targeting SNCA can be excellent via human molecular genetics, e.g., SNCA point mutations and duplications cause familial PD, in tissues such as medulla oblongata; or substantia nigra of the midbrain. The mechanism of this targeting may be because overexpression or expression of abnormal SNCA protein leads to toxic peptides and neuronal death. The efficacy has been shown by 70% KD of SNCA. With respect to safety, SNCA KO mice are healthy. Possible diagnosis includes family history; genetic testing; or early symptoms. Biomarkers that can be used include, e.g., CSF SNCA mRNAs and proteins.

### Targeting LRRK2 for Parkinson Disease

[0844] Leucine-rich repeat kinase 2 mutations causes familial Parkinson disease. This disease is lethal neurodegenerative disorder with no disease-modifying therapy. The prevalence of PD is 4 million worldwide; ⅓ of PD is familial; 3-7% of fPD is caused by LRRK2. Targeting LRRK2 can be excellent via human molecular genetics, e.g., LRRK2 point mutations cause familial PD, in tissues such as medulla oblongata; or substantia nigra of the midbrain. Possible diagnosis includes family history; genetic testing; early symptoms. Biomarkers that can be used include, e.g., CSF mRNAs and proteins.

### Targeting GARS for Spinal Muscular Atrophy V

[0845] Autosomal dominant Glycyl-tRNA Synthetase mutations causes spinal muscular atrophy V (SMAV) or distal hereditary motor neuropathy Va. These diseases are neurodegenerative disorders with no disease-modifying therapy. These are very rare diseases. Targeting GARs can be good via human molecular genetics, e.g., GARS point mutations cause familial SMA, in tissues such as spinal cord. Possible diagnosis includes family history; genetic testing; early symptoms.

Targeting Seipin for spinal Muscular Atrophy

[0846] Autosomal dominant Seipin mutations causes spinal muscular atrophy (SMA) or distal hereditary motor neuropathy. These diseases are neurodegenerative disorders with no disease-modifying therapy. These are very rare diseases. Targeting Seipin can be good via human molecular genetics, e.g., Seipin point mutations cause familial SMA, in tissues such as spinal cord. The mechanism of this targeting is probably GOF and toxic peptides. The efficacy has been shown by 50% KD. With respect to safety, recessive LOF mutations cause progressive encephalopathy with or without lipodystrophy. Possible diagnosis includes family history; genetic testing; or early symptoms.

[0847] Dominant Inherited Alzheimer Disease is a devastating disorders with no disease-modifying therapy. The targets include APP because of central mechanistic role in familial disease and possible role in common AD.

### Targeting APP for Alzheimer Disease

[0848] Amyloid precursor protein mutations causes early onset familial Alzheimer disease (EOFAD); AD in down syndrome; or AD. These diseases are lethal neurodegenerative disorders with no disease-modifying therapy. The prevalence of EOFAD-APP is 1% AD; the prevalence of Trisomy 21 is 1% AD; and the prevalence of AD is about 2.5-5 million in US. Targeting APP can be excellent via human molecular genetics, e.g., APP duplications and point mutations cause EOFAD, in tissues such as cerebral cortex or hippocampus. The mechanism of this targeting may be because APP overexpression or expression of toxic metabolites cause progressive neuronal death. The efficacy has been shown by 70% KD of APP. With respect to safety, KD mice have been reported healthy with some behavioral abnormalities; KD mice have been reported healthy with some spatial memory effects. Possible diagnosis includes family history; genetic testing; early symptoms; or MRI. Biomarkers that can be used include, e.g., CSF APP mRNA and peptides.

### Targeting PSEN1 for Alzheimer Disease

[0849] Presenilin 1 mutations causes early onset familial Alzheimer disease (EOFAD); or AD. These diseases are lethal neurodegenerative disorder with no disease-modifying therapy. Targeting PSEN1 can be excellent via human molecular genetics, e.g., PSEN1 point mutations cause EOFAD, in tissues such as cerebral cortex; or hippocampus. The mechanism of this targeting may be because autosomal dominant mutations of PSEN1 cause abnormal APP metabolism and toxic peptides cause progressive neuronal death. The efficacy has been shown by APP KD may obviate need for PSEN1-specific therapy. Possible diagnosis includes family history; genetic testing; early symptoms; or MRI. Biomarkers that can be used include, e.g., CSF PSEN1 and APP peptides.

### Targeting PSEN2 for Alzheimer Disease

[0850] Presenilin 2 mutations causes early onset familial Alzheimer disease (EOFAD); or AD. These diseases are lethal neurodegenerative disorder with no disease-modifying therapy. Targeting PSEN2 can be excellent via human molecular genetics, e.g., PSEN2 point mutations cause EOFAD, in tissues such as cerebral cortex or hippocampus. The mechanism of this targeting may be because autosomal dominant mutations of PSEN2 cause abnormal APP metabolism and toxic peptides cause progressive neuronal death. Possible diagnosis includes family history; genetic testing; early symptoms; or MRI. Biomarkers that can be used include, e.g., CSF PSEN2 and APP peptides.

### Targeting Apo E for Alzheimer Disease

[0851] Apolipoprotein E4 is associated with sporadic AD in the elderly. This disease is lethal neurodegenerative disorder with no disease-modifying therapy. The prevalence of AD is 2.5-5 million in US. Targeting Apo E may be effective because genomic evidence supporting the association between ApoE4 and AD is excellent in many populations. The target tissue may be cerebral cortex. It is not yet clear if Apo E4 contributes to the pathogenesis of AD despite the strong association in many populations. Thus far, data indicate that Apo E4 homozygosity indicates increased risk of AD in the elderly but is not sufficient for causing AD, even in the elderly. With respect to safety, KD of Apo E in CNS may be safe as human LOF mutations in Apo E are not associated with obvious neurologic defects, although systemic exposure may cause hyperlipoproteinemia type III. Possible diagnosis includes clinical diagnosis of AD; exclusion of EOFAD mutation; genetic testing for the Apo E4 genotype. Biomarkers that can be used include, e.g., CSF APP, Tau mRNA and peptides.

[0852] CNS Gene Duplication Disorders. Consistent KD by half may ameliorate these disorders. The targets include MeCP2.

### Targeting MeCP2 for X-Linked Mental Retardation

[0853] Methyl CpG Binding Protein 2 gene duplication causes X-linked Mental Retardation (XLMR). This disease is lethal cognitive disorder with no disease-modifying therapy. 1-15% of X-linked MR is caused by MeCP2 duplication; 2-3% of population has MR. Targeting MeCP2 can be excellent via human molecular genetics, e.g., MeCP2 duplication causes XLMR, in tissues such as cerebral cortex. The mechanism of this targeting may be because MeCP2 over-expression cause dysregulation of other gene and neurodegeneration. The efficacy has been shown by 50% KD of MeCP2; and ASO KD in mouse models reverse phenotype. With respect to safety, MeCP2 LOF mutations may cause Rett syndrome. Possible diagnosis includes family history; genetic testing; or early symptoms. Biomarkers that can be used include, e.g., CSF MeCP2 mRNA and peptides.

[0854] Dominant Inherited Cerebral Amyloid Angiopathy is a devastating disorder with no disease-modifying therapy. The targets include TTR.

Targeting TTR for hATTR CAA

[0855] This targeting may be a low risk introduction to CNS siRNA. Cerebral Amyloid Angiopathy (CAA) and Meningeal Amyloid are lethal disorders with no disease-modifying therapy. Targeting TTR can be excellent via human genetics and pharmacology. The target tissues can be CNS vascular system, or CNS. The mechanism of this targeting may be because Mutant protein accumulates in vascular adventitia, causing CNS bleeds. The efficacy has been shown by 70% KD of TTR. Possible diagnosis includes family history; genetic testing; or early symptoms. Biomarkers that can be used include, e.g., CSF mRNA and protein.

### Targeting ITM2B for CAA

[0856] Integral Membrane Protein 2B mutations causes Cerebral Amyloid Angiopathy (CAA), British Type or Familial British Dementia (FBD). Specific mutation may also cause dominant retinal degeneration. This disease is lethal disorder with no disease-modifying therapy. This is a rare disease. Targeting ITM2B can be excellent via human molecular genetics. The target tissues can be CNS vascular system, or CNS. The mechanism of this targeting probably involves GOF mutations. The efficacy has been shown by 70% KD of ITM2B mutant allele. Possible diagnosis includes family history; genetic testing; or early symptoms. Biomarkers that can be used include, e.g., CSF mRNA and protein possible.

### Targeting CST3 for CAA

[0857] Cystatin C mutations causes familial cerebral amyloid angiopathy, Icelandic type. This disease is lethal disorder with no disease-modifying therapy. This is a rare disease, except in Iceland and Denmark. Targeting CST3 can be excellent via human genetics. The target tissue can be CNS vascular system. The mechanism of this targeting may be because mutant protein accumulates in vascular adventitia, causing CNS bleeds. The efficacy has been shown by Possibly 70% KD of mutant allele. With respect to safety, CST3 KO mice may have risk of arthritis. Possible diagnosis includes family history; genetic testing; or early symptoms. Biomarkers that can be used include, e.g., CSF mRNA and protein possible.

### Targeting SPAST for Spastic Paraplegia

[0858] SPASTIN mutations causes Spastic Paraplegia (SP) 4 with cognitive loss. This disease is lower motor neurodegenerative disorder with no disease-modifying therapy. The prevalence of SP is 5 per 100,000 population; SP4 is 45% of dominant SP. Targeting SPAST can be excellent via human molecular genetics, e.g., SPAST trinucleotide mutations causes familial SP, in tissues such as spinal cord; or CNS. The mechanism of this targeting may be because nonsense and probable dominant-negative mutations cause abnormal microtubule metabolism and neurodegeneration. Possible diagnosis includes family history; genetic testing; or early symptoms. Biomarkers that can be used include, e.g., CSF SPAST mRNAs and proteins possible.

### Targeting KIF5A for Spastic Paraplegia

[0859] Kinesin Family Member 5A mutations causes Spastic Paraplegia (SP) 10 with peripheral neuropathy and other disorders. This disease is lower motor neurodegenerative disorder with no disease-modifying therapy. The prevalence of SP is 5 per 100,000 people; SP10 is 1 per 1,000,000 people. Targeting KIF5A can be excellent via human molecular genetics, e.g., KIF5A amino terminal missense mutations cause SP10; and KIF5A is expressed in the CNS and encodes a microtubule motor protein. The target tissue may be spinal cord. The mechanism of this targeting may be because autosomal dominant missense mutations cause SP10 possibly affect microtubule binding to themotor. The efficacy may be provided by possibly KD of mutant alleles. With respect to safety, KIF5A frameshift mutations cause Neonatal intractable myoclonus and splice site mutations are associated with familial ALS, possibly through LOF mechanisms. Possible diagnosis includes family history; genetic testing; or early symptoms. Biomarkers that can be used include, e.g., CSF mRNAs and proteins possible.

### Targeting ATL1 for Spastic Paraplegia

[0860] Atlastin mutations causes Spastic Paraplegia 3A and Sensory Neuropathy 1D, Hereditary Sensory Neuropathy (HSN). This disease is a lower motor neurodegenerative disorder with no disease-modifying therapy. The prevalence of SP is 5 per 100,000 people; SP3A is a rare dominant form. Targeting ATL1 can be excellent via human molecular genetics, e.g., ATL1 point mutations cause familial SP. The target tissue may be spinal cord. The mechanism of this targeting may be because autosomal dominant expression of dominant-negative ATLI protein causes SP3A; however, LOF mutations causes Sensory Neuropathy ID. The efficacy has been shown by 70% KD of specific ATLI allele. With respect to safety, ATLI heterozygous LOF mutations causes HSN1D. Possible diagnosis includes family history; genetic testing; or early symptoms. Biomarkers that can be used include, e.g., CSF ATLI mRNAs and proteins.

### Targeting NIPA1 for Spastic Paraplegia

[0861] LOF NIPA1 mutations cause Spastic Paraplegia 6 with epilepsy and seizures. This disease is lower motor neurodegenerative disorder with no disease-modifying therapy. The prevalence of SP is 5 per 100,000 people; SP6 is a rare dominant form. Targeting NIPA1 can be excellent via human molecular genetics, e.g., NIPA1 point mutations cause familial SP. The target tissues can be spinal cord; or CNS. The mechanism of this targeting may be because autosomal dominant expression of defective membrane protein causes SP3A; and possibly LOF. Possible diagnosis includes family history; genetic testing; or early symptoms. Biomarkers that can be used include, e.g., CSF mRNAs and proteins possible.

[0862] Dominant Inherited Myotonic Dystrophy is a disorder of CNS, Skeletal Muscle and Cardiac Muscle Requiring CNS and Systemic Therapy. The targets include MPK for DM1.

### Targeting DMPK for Myotonic Dystrophy 1

[0863] CNS and systemic therapy needed for effective therapy targeting ystrophia Myotonica Protein Kinase. Myotonic dystrophy 1 (DM1) is a degenerative disorder of muscle and CNS. It is a lethal disorder with no disease-modifying therapy. The prevalence of DM1 is 1 per 8,000 people worldwide. Targeting DMPK can be excellent via human molecular genetics, e.g., DMPK CTG repeat expansion causes familial DM1. The target tissues may be skeletal muscle, cardiac muscle, or CNS. The mechanism of this targeting may be because autosomal dominant non-coding CTG repeat causes abnormal RNA processing and dominant negative effect; anticipation from extreme expansion causes early onset disease. The efficacy has been shown by 70% of DMPK; and ASO efficacy have been demonstrated in mice. The safety has been demonstrated in mice with KO and ASO KD. Possible diagnosis includes family history; genetic testing; or early symptoms. Biomarkers that can be used include, e.g., Blood and CSF mRNAs and proteins.

### Targeting ZNF9 for Myotonic Dystrophy 2

[0864] Zinc Finger Protein 9 mutations causes Myotonic dystrophy 2 (DM2), a degenerative disorder of skeletal muscle. This is a serious disorder with no disease-modifying therapy. The prevalence of DM2 is 1 per 8,000 people worldwide; it is the most common muscular dystrophy in adults. Targeting ZNF9 can be excellent via human molecular genetics, e.g., ZNF9 CTTG repeat expansion in intron 1 causes familial DM2. The target tissues can be skeletal muscle, or cardiac muscle. The mechanism of this targeting may be because autosomal dominant CTTG repeat expansion in intron 1 causes abnormal RNA metabolism and dominant negative effects. The efficacy has been shown by 70% of ZNF9. Safe KD in mice has been demonstrated. Possible diagnosis includes family history; genetic testing; or early symptoms. Biomarkers that can be used include, e.g., Blood mRNAs and proteins.

[0865] Dominant Inherited Prion Diseases are inherited, sporadic and transmissible PRNP disorders. The targets include PRNP.

### Targeting PRNP for Myotonic Prion Diseases

[0866] Myotonic prion diseases are dominant inherited Prion diseases, including PRNP-Related Cerebral Amyloid Angiopathy, Gerstmann-Straussler Disease (GSD), Creutzfeldt-Jakob Disease (CJD), Fatal Familial Insomnia (FFI), Huntington Disease-Like 1 (HDL1), and Kuru susceptibility. These diseases are lethal neurodegenerative disorders with no disease-modifying therapy. The prevalence of this type of diseases is 1 per 1,000,000 people. Targeting PRNP can be excellent via human molecular genetics, e.g., PRNP mutations causes familial and sporadic Prion disease. The target tissue can be CNS. The mechanism of this targeting may be because autosomal dominant protein mid-folding causes neurotoxicity. The efficacy has been shown by 70% of PRNP KD; and PRNP polymorphisms appear protective for Kuru. With respect to safety, PRNP KO mice have been reported healthy. Possible diagnosis includes family history; genetic testing; or early symptoms. Biomarkers that can be used include, e.g., CSF mRNAs and proteins.

### Targeting Glycogen Synthase for Myoclonic Epilepsy of Lafora

[0867] Laforin (EPM2A) gene mutations causes AR Myoclonic Epilepsy, an inherited progressive seizure disorder. This disease is a lethal disorder of seizures and cognitive decline with no disease-modifying therapy. The prevalence of this disease is 4 per 1,000,000 people. Targeting Glycogen Synthase can be excellent via human molecular genetics, e.g., mutations causes AR familial Myoclonic Epilepsy of Lafora. The target tissue may be CNS. The mechanism of this targeting may be because autosomal recessive dysfunction of Laforin causes misfolding of glycogen and foci for seizures. The efficacy has been shown by 70% KD of Glycogen synthase GYS1. With respect to safety, GYS1 deficiency causes skeletal and cardiac muscle glycogen deficiency; GYS1 mice that survive have muscle defects. Possible diagnosis includes family history; genetic testing; or early symptoms. Biomarkers that can be used include, e.g., CSF mRNAs and protein.

[0868] In some embodiments, the invention provides a dsRNA agent that target genes for diseases including, but are not limited to, age-related macular degeneration (AMD) (dry and wet), birdshot chorioretinopathy, dominant retinitis pigmentosa 4, Fuch's dystrophy, hATTR amyloidosis, hereditary and sporadic glaucoma, and stargardt's disease.

[0869] In some embodiments, the invention provides a dsRNA agent that targets VEGF for wet (or exudative) AMD.

[0870] In some embodiments, the invention provides a dsRNA agent that targets C3 for dry (or nonexudative) AMD.

[0871] In some embodiments, the invention provides a dsRNA agent that targets CFB for dry (or nonexudative) AMD.

[0872] In some embodiments, the invention provides a dsRNA agent that targets MYOC for glaucoma.

[0873] In some embodiments, the invention provides a dsRNA agent that targets ROCK2 for glaucoma.

[0874] In some embodiments, the invention provides a dsRNA agent that targets ADRB2 for glaucoma.

[0875] In some embodiments, the invention provides a dsRNA agent that targets CA2 for glaucoma.

[0876] In some embodiments, the invention provides a dsRNA agent that targets CRYGC for cataract.

[0877] In some embodiments, the invention provides a dsRNA agent that targets PPP3CB for dry eye syndrome.

### Ligands

[0878] In certain embodiments, the dsRNA agent is further modified by covalent attachment of one or more conjugate groups. In general, conjugate groups modify one or more properties of the attached dsRNA agent including but not limited to pharmacodynamic, pharmacokinetic, binding, absorption, cellular distribution, cellular uptake, charge and clearance. Conjugate groups are routinely used in the chemical arts and are linked directly or via an optional linking moiety or linking group to a parent compound such as an oligomeric compound. A preferred list of conjugate groups includes without limitation, intercalators, reporter molecules, polyamines, polyamides, polyethylene glycols, thioethers, polyethers, cholesterols, thiocholesterols, cholic acid moieties, folate, lipids, phospholipids, biotin, phenazine, phenanthridine, anthraquinone, adamantane, acridine, fluoresceins, rhodamines, coumarins and dyes.

[0879] In some embodiments, the dsRNA agent further comprises a targeting ligand that targets a receptor which mediates delivery to a specific CNS tissue. These targeting ligands can be conjugated in combination with the lipophilic moiety to enable specific intrathecal and systemic delivery.

[0880] Exemplary targeting ligands that targets the receptor mediated delivery to a CNS tissue are peptide ligands such as Angiopep-2, lipoprotein receptor related protein (LRP) ligand, bEnd.3 cell binding ligand; transferrin receptor (TfR) ligand (which can utilize iron transport system in brain and cargo transport into the brain parenchyma); manose receptor ligand (which targets olfactory ensheathing cells, glial cells), glucose transporter protein, and LDL receptor ligand.

[0881] In some embodiments, the dsRNA agent further comprises a targeting ligand that targets a receptor which mediates delivery to a specific ocular tissue. These targeting ligands can be conjugated in combination with the lipophilic moiety to enable specific intravitreal and systemic delivery. Exemplary targeting ligands that targets the receptor mediated delivery to a ocular tissue are lipophilic ligands such as all-trans retinol (which targets the retinoic acid receptor); RGD peptide (which targets retinal pigment epithelial cells), such as H-Gly-Arg-Gly-Asp-Ser-Pro-Lys-Cys-OH (SEQ ID NO.: 1) or Cyclo(-Arg-Gly-Asp-D-Phe-Cys (SEQ ID NO.:2); LDL receptor ligands; and carbohydrate based ligands (which targets endothelial cells in posterior eye).

[0882] Preferred conjugate groups amenable to the present invention include lipid moieties such as a cholesterol moiety (Letsinger et al., Proc. Natl. Acad. Sci. USA, 1989, 86, 6553); cholic acid (Manoharan et al., Bioorg. Med. Chem. Lett., 1994, 4, 1053); a thioether, e.g., hexyl-S-tritylthiol (Manoharan et al., Ann. N.Y. Acad. Sci., 1992, 660, 306; Manoharan et al., Bioorg. Med. Chem. Let., 1993, 3, 2765); a thiocholesterol (Oberhauser et al., Nucl. Acids Res., 1992, 20, 533); an aliphatic chain, e.g., dodecandiol or undecyl residues (Saison-Behmoaras et al., EMBO J., 1991, 10, 111; Kabanov et al., FEBS Lett., 1990, 259, 327; Svinarchuk et al., Biochimie, 1993, 75, 49); a phospholipid, e.g., di-hexadecyl-rac-glycerol or triethylammonium-1,2-di-O-hexadecyl-rac-glycero-3-H-phosphonate (Manoharan et al., Tetrahedron Lett., 1995, 36, 3651; Shea et al., Nucl. Acids Res., 1990, 18, 3777); a polyamine or a polyethylene glycol chain (Manoharan et al., Nucleosides & Nucleotides, 1995, 14, 969); adamantane acetic acid (Manoharan et al., Tetrahedron Lett., 1995, 36, 3651); a palmityl moiety (Mishra et al., Biochim. Biophys. Acta, 1995, 1264, 229); or an octadecylamine or hexylamino-carbonyl-oxycholesterol moiety (Crooke et al., J. Pharmacol. Exp. Ther., 1996, 277, 923).

[0883] Generally, a wide variety of entities, e.g., ligands, can be coupled to the oligomeric compounds described herein. Ligands can include naturally occurring molecules, or recombinant or synthetic molecules. Exemplary ligands include, but are not limited to, polylysine (PLL), poly L-aspartic acid, poly L-glutamic acid, styrene-maleic acid anhydride copolymer, poly(L-lactide-co-glycolied) copolymer, divinyl ether-maleic anhydride copolymer, N-(2-hydroxypropyl)methacrylamide copolymer (HMPA), polyethylene glycol (PEG, e.g., PEG-2K, PEG-5K, PEG-10K, PEG-12K, PEG-15K, PEG-20K, PEG-40K), MPEG, [MPEG]₂, polyvinyl alcohol (PVA), polyurethane, poly(2-ethylacryllic acid), N-isopropylacrylamide polymers, polyphosphazine, polyethylenimine, cationic groups, spermine, spermidine, polyamine, pseudopeptide-polyamine, peptidomimetic polyamine, dendrimer polyamine, arginine, amidine, protamine, cationic lipid, cationic porphyrin, quaternary salt of a polyamine, thyrotropin, melanotropin, lectin, glycoprotein, surfactant protein A, mucin, glycosylated polyaminoacids, transferrin, bisphosphonate, polyglutamate, polyaspartate, aptamer, asialofetuin, hyaluronan, procollagen, immunoglobulins (e.g., antibodies), insulin, transferrin, albumin, sugar-albumin conjugates, intercalating agents (e.g., acridines), cross-linkers (e.g. psoralen, mitomycin C), porphyrins (e.g., TPPC4, texaphyrin, Sapphyrin), polycyclic aromatic hydrocarbons (e.g., phenazine, dihydrophenazine), artificial endonucleases (e.g., EDTA), lipophilic molecules (e.g, steroids, bile acids, cholesterol, cholic acid, adamantane acetic acid, 1-pyrene butyric acid, dihydrotestosterone, 1,3-Bis-O(hexadecyl)glycerol, geranyloxyhexyl group, hexadecylglycerol, borneol, menthol, 1,3-propanediol, heptadecyl group, palmitic acid, myristic acid, O3-(oleoyl)lithocholic acid, O3-(oleoyl)cholenic acid, dimethoxytrityl, or phenoxazine), peptides (e.g., an alpha helical peptide, amphipathic peptide, RGD peptide, cell permeation peptide, endosomolytic/fusogenic peptide), alkylating agents, phosphate, amino, mercapto, polyamino, alkyl, substituted alkyl, radiolabeled markers, enzymes, haptens (e.g. biotin), transport/absorption facilitators (e.g., naproxen, aspirin, vitamin E, folic acid), synthetic ribonucleases (e.g., imidazole, bisimidazole, histamine, imidazole clusters, acridine-imidazole conjugates, Eu3+ complexes of tetraazamacrocycles), dinitrophenyl, HRP, AP, antibodies, hormones and hormone receptors, lectins, carbohydrates, multivalent carbohydrates, vitamins (e.g., vitamin A, vitamin E, vitamin K, vitamin B, e.g., folic acid, B12, riboflavin, biotin and pyridoxal), vitamin cofactors, lipopolysaccharide, an activator of p38 MAP kinase, an activator of NF-κB, taxon, vincristine, vinblastine, cytochalasin, nocodazole, japlakinolide, latrunculin A, phalloidin, swinholide A, indanocine, myoservin, tumor necrosis factor alpha (TNFalpha), interleukin-1 beta, gamma interferon, natural or recombinant low density lipoprotein (LDL), natural or recombinant high-density lipoprotein (HDL), and a cell-permeation agent (e.g., a helical cell-permeation agent).

[0884] Peptide and peptidomimetic ligands include those having naturally occurring or modified peptides, e.g., D or L peptides; α, β, or γ peptides; N-methyl peptides; azapeptides; peptides having one or more amide, i.e., peptide, linkages replaced with one or more urea, thiourea, carbamate, or sulfonyl urea linkages; or cyclic peptides. A peptidomimetic (also referred to herein as an oligopeptidomimetic) is a molecule capable of folding into a defined three-dimensional structure similar to a natural peptide. The peptide or peptidomimetic ligand can be about 5-50 amino acids long, e.g., about 5, 10, 15, 20, 25, 30, 35, 40, 45, or 50 amino acids long.

[0885] Exemplary amphipathic peptides include, but are not limited to, cecropins, lycotoxins, paradaxins, buforin, CPF, bombinin-like peptide (BLP), cathelicidins, ceratotoxins, S. clava peptides, hagfish intestinal antimicrobial peptides (HFIAPs), magainines, brevinins-2, dermaseptins, melittins, pleurocidin, H₂A peptides, Xenopus peptides, esculentinis-1, and caerins.

[0886] As used herein, the term “endosomolytic ligand” refers to molecules having endosomolytic properties. Endosomolytic ligands promote the lysis of and/or transport of the composition of the invention, or its components, from the cellular compartments such as the endosome, lysosome, endoplasmic reticulum (ER), Golgi apparatus, microtubule, peroxisome, or other vesicular bodies within the cell, to the cytoplasm of the cell. Some exemplary endosomolytic ligands include, but are not limited to, imidazoles, poly or oligoimidazoles, linear or branched polyethyleneimines (PEIs), linear and branched polyamines, e.g. spermine, cationic linear and branched polyamines, polycarboxylates, polycations, masked oligo or poly cations or anions, acetals, polyacetals, ketals/polyketals, orthoesters, linear or branched polymers with masked or unmasked cationic or anionic charges, dendrimers with masked or unmasked cationic or anionic charges, polyanionic peptides, polyanionic peptidomimetics, pH-sensitive peptides, natural and synthetic fusogenic lipids, natural and synthetic cationic lipids.

[0887] Exemplary endosomolytic/fusogenic peptides include, but are not limited to,

(GALA)
(SEQ ID NO.: 4)
AALEALAEALEALAEALEALAEAAAAGGC;
(EALA)
(SEQ ID NO.: 5)
AALAEALAEALAEALAEALAEALAAAAGGC;
(SEQ ID NO.: 6)
ALEALAEALEALAEA;
(INF-7)
(SEQ ID NO.: 7)
GLFEAIEGFIENGWEGMIWDYG;
(Inf HA-2)
(SEQ ID NO.: 8)
GLFGAIAGFIENGWEGMIDGWYG;
(diINF-7)
(SEQ ID NO.: 9)
GLFEAIEGFIENGWEGMIDGWYGCGLFEAIEGFIENGWEGMID GWYGC;
(diINF-3)
(SEQ ID NO.: 10)
GLFEAIEGFIENGWEGMIDGGCGLFEAIEGFIENGWEGMIDGGC;
(GLF)
(SEQ ID NO.: 11)
GLFGALAEALAEALAEHLAEALAEALEALAAGGSC;
(GALA-INF3)
(SEQ ID NO.: 12)
GLFEAIEGFIENGWEGLAEALAEALEALAAGGSC;
(INF-5, n is norleucine)
(SEQ ID NO.: 13)
GLF EAI EGFI ENGW EGnI DG K GLF EAI EGFI ENGW EGnI
DG;
(JTS-1)
(SEQ ID NO.: 14)
LFEALLELLESLWELLLEA;
(ppTG1)
(SEQ ID NO.: 15)
GLFKALLKLLKSLWKLLLKA;
(ppTG20)
(SEQ ID NO.: 16)
GLFRALLRLLRSLWRLLLRA;
(KALA)
(SEQ ID NO.: 17)
WEAKLAKALAKALAKHLAKALAKALKACEA;
(HA)
(SEQ ID NO.: 18)
GLFFEAIAEFIEGGWEGLIEGC;
(Melittin)
(SEQ ID NO.: 19)
GIGAVLKVLTTGLPALISWIKRKRQQ;
(SEQ ID NO.: 20)
H₅WYG;
and
(SEQ ID NO.: 21)
CHK₆HC.

[0888] Without wishing to be bound by theory, fusogenic lipids fuse with and consequently destabilize a membrane. Fusogenic lipids usually have small head groups and unsaturated acyl chains. Exemplary fusogenic lipids include, but are not limited to, 1,2-dileoyl-sn-3-phosphoethanolamine (DOPE), phosphatidylethanolamine (POPE), palmitoyloleoylphosphatidylcholine (POPC), (6Z,9Z,28Z,31Z)-heptatriaconta-6,9,28,31-tetraen-19-ol (Di-Lin), N-methyl(2,2-di((9Z,12Z)-octadeca-9,12-dienyl)-1,3-dioxolan-4-yl)methanamine (DLin-k-DMA) and N-methyl-2-(2,2-di((9Z,12Z)-octadeca-9,12-dienyl)-1,3-dioxolan-4-yl)ethanamine (also referred to as XTC herein).

[0889] Synthetic polymers with endosomolytic activity amenable to the present invention are described in U.S. Pat. App. Pub. Nos. 2009/0048410; 2009/0023890; 2008/0287630; 2008/0287628; 2008/0281044; 2008/0281041; 2008/0269450; 2007/0105804; 2007/0036865; and 2004/0198687, contents of which are hereby incorporated by reference in their entirety.

[0890] Exemplary cell permeation peptides include, but are not limited to, RQIKIWFQNRRMKWKK (penetratin) (SEQ ID NO.: 22); GRKKRRQRRRPPQC (Tat fragment 48-60) (SEQ ID NO.: 23); GALFLGWLGAAGSTMGAWSQPKKKRKV (signal sequence based peptide) (SEQ ID NO.: 24); LLIILRRRIRKQAHAHSK (PVEC) (SEQ ID NO.: 25); GWTLNSAGYLLKINLKALAALAKKIL (transportan) (SEQ ID NO.: 26); KLALKLALKALKAALKLA (amphiphilic model peptide) (SEQ ID NO.: 27); RRRRRRRRR (Arg9) (SEQ ID NO.: 28); KFFKFFKFFK (Bacterial cell wall permeating peptide) (SEQ ID NO.: 29); LLGDFFRKSKEKIGKEFKRIVQRIKDFLRNLVPRTES (LL-37) (SEQ ID NO.: 30); SWLSKTAKKLENSAKKRISEGIAIAIQGGPR (cecropin P1) (SEQ ID NO.: 31); ACYCRIPACIAGERRYGTCIYQGRLWAFCC (α-defensin) (SEQ ID NO.: 32); DHYNCVSSGGQCLYSACPIFTKIQGTCYRGKAKCCK (β-defensin) (SEQ ID NO.: 33); RRRPRPPYLPRPRPPPFFPPRLPPRIPPGFPPRFPPRFPGKR-NH2 (PR-39) (SEQ ID NO.: 34); ILPWKWPWWPWRR-NH2 (indolicidin) (SEQ ID NO.: 35); AAVALLPAVLLALLAP (RFGF) (SEQ ID NO.: 36); AALLPVLLAAP (RFGF analogue) (SEQ ID NO.: 37); and RKCRIVVIRVCR (bactenecin) (SEQ ID NO.: 38).

[0891] Exemplary cationic groups include, but are not limited to, protonated amino groups, derived from e.g., O-AMINE (AMINE=NH₂; alkylamino, dialkylamino, heterocyclyl, arylamino, diaryl amino, heteroaryl amino, or diheteroaryl amino, ethylene diamine, polyamino); aminoalkoxy, e.g., O(CH₂)ₙAMINE, (e.g., AMINE=NH₂; alkylamino, dialkylamino, heterocyclyl, arylamino, diaryl amino, heteroaryl amino, or diheteroaryl amino, ethylene diamine, polyamino); amino (e.g. NH₂; alkylamino, dialkylamino, heterocyclyl, arylamino, diaryl amino, heteroaryl amino, diheteroaryl amino, or amino acid); and NH(CH₂CH₂NH)ₙCH₂CH₂-AMINE (AMINE=NH₂; alkylamino, dialkylamino, heterocyclyl, arylamino, diaryl amino, heteroaryl amino, or diheteroaryl amino).

[0892] As used herein the term “targeting ligand” refers to any molecule that provides an enhanced affinity for a selected target, e.g., a cell, cell type, tissue, organ, region of the body, or a compartment, e.g., a cellular, tissue or organ compartment. Some exemplary targeting ligands include, but are not limited to, antibodies, antigens, folates, receptor ligands, carbohydrates, aptamers, integrin receptor ligands, chemokine receptor ligands, transferrin, biotin, serotonin receptor ligands, PSMA, endothelin, GCPII, somatostatin, LDL and HDL ligands.

[0893] Carbohydrate based targeting ligands include, but are not limited to, D-galactose, multivalent galactose, N-acetyl-D-galactosamine (GalNAc), multivalent GalNAc, e.g. GalNAc₂ and GalNAc₃ (GalNAc and multivalent GalNAc are collectively referred to herein as GalNAc conjugates); D-mannose, multivalent mannose, multivalent lactose, N-acetyl-glucosamine, Glucose, multivalent Glucose, multivalent fucose, glycosylated polyaminoacids and lectins. The term multivalent indicates that more than one monosaccharide unit is present. Such monosaccharide subunits can be linked to each other through glycosidic linkages or linked to a scaffold molecule.

[0894] A number of folate and folate analogs amenable to the present invention as ligands are described in U.S. Pat. Nos. 2,816,110; 5,552,545; 6,335,434 and 7,128,893, contents of which are herein incorporated in their entireties by reference.

[0895] As used herein, the terms “PK modulating ligand” and “PK modulator” refers to molecules which can modulate the pharmacokinetics of the composition of the invention. Some exemplary PK modulator include, but are not limited to, lipophilic molecules, bile acids, sterols, phospholipid analogues, peptides, protein binding agents, vitamins, fatty acids, phenoxazine, aspirin, naproxen, ibuprofen, suprofen, ketoprofen, (S)-(+)-pranoprofen, carprofen, PEGs, biotin, and transthyretia-binding ligands (e.g., tetraiidothyroacetic acid, 2, 4, 6-triiodophenol and flufenamic acid). Oligomeric compounds that comprise a number of phosphorothioate intersugar linkages are also known to bind to serum protein, thus short oligomeric compounds, e.g. oligonucleotides of comprising from about 5 to 30 nucleotides (e.g., 5 to 25 nucleotides, preferably 5 to 20 nucleotides, e.g., 5, 6, 7, 8, 9, 10, 11, 12, 13, 14, 15, 16, 17, 18, 19, or 20 nucleotides), and that comprise a plurality of phosphorothioate linkages in the backbone are also amenable to the present invention as ligands (e.g. as PK modulating ligands). The PK modulating oligonucleotide can comprise at least 3, 4, 5, 6, 7, 8, 9, 10, 11, 12, 13, 14, 15 or more phosphorothioate and/or phosphorodithioate linkages. In some embodiments, all internucleotide linkages in PK modulating oligonucleotide are phosphorothioate and/or phosphorodithioates linkages. In addition, aptamers that bind serum components (e.g. serum proteins) are also amenable to the present invention as PK modulating ligands. Binding to serum components (e.g. serum proteins) can be predicted from albumin binding assays, such as those described in Oravcova, et al., Journal of Chromatography B (1996), 677: 1-27.

[0896] When two or more ligands are present, the ligands can all have same properties, all have different properties or some ligands have the same properties while others have different properties. For example, a ligand can have targeting properties, have endosomolytic activity or have PK modulating properties. In a preferred embodiment, all the ligands have different properties.

[0897] The ligand or tethered ligand can be present on a monomer when said monomer is incorporated into a component of the dsRNA agent (e.g., a dsRNA agent or linker). In some embodiments, the ligand can be incorporated via coupling to a “precursor” monomer after said “precursor” monomer has been incorporated into a component of the dsRNA agent (e.g., a dsRNA agent or linker). For example, a monomer having, e.g., an amino-terminated tether (i.e., having no associated ligand), e.g., monomer-linker-NH₂ can be incorporated into into a component of the compounds (e.g., a dsRNA agent or linker). In a subsequent operation, i.e., after incorporation of the precursor monomer into a component of the dsRNA agent (e.g., a dsRNA agent or linker), a ligand having an electrophilic group, e.g., a pentafluorophenyl ester or aldehyde group, can subsequently be attached to the precursor monomer by coupling the electrophilic group of the ligand with the terminal nucleophilic group of the precursor monomer's tether.

[0898] In another example, a monomer having a chemical group suitable for taking part in Click Chemistry reaction can be incorporated e.g., an azide or alkyne terminated tether/linker. In a subsequent operation, i.e., after incorporation of the precursor monomer into the strand, a ligand having complementary chemical group, e.g. an alkyne or azide can be attached to the precursor monomer by coupling the alkyne and the azide together.

[0899] In some embodiments, ligand can be conjugated to nucleobases, sugar moieties, or internucleosidic linkages of the double-stranded iRNA agent. Conjugation to purine nucleobases or derivatives thereof can occur at any position including, endocyclic and exocyclic atoms. In some embodiments, the 2-, 6-, 7-, or 8-positions of a purine nucleobase are attached to a conjugate moiety. Conjugation to pyrimidine nucleobases or derivatives thereof can also occur at any position. In some embodiments, the 2-, 5-, and 6-positions of a pyrimidine nucleobase can be substituted with a conjugate moiety. When a ligand is conjugated to a nucleobase, the preferred position is one that does not interfere with hybridization, i.e., does not interfere with the hydrogen bonding interactions needed for base pairing.

[0900] Conjugation to sugar moieties of nucleosides can occur at any carbon atom. Example carbon atoms of a sugar moiety that can be attached to a conjugate moiety include the 2′, 3′, and 5′ carbon atoms. The 1′ position can also be attached to a conjugate moiety, such as in an abasic residue. Internucleosidic linkages can also bear conjugate moieties. For phosphorus-containing linkages (e.g., phosphodiester, phosphorothioate, phosphorodithiotate, phosphoroamidate, and the like), the conjugate moiety can be attached directly to the phosphorus atom or to an O, N, or S atom bound to the phosphorus atom. For amine- or amide-containing internucleosidic linkages (e.g., PNA), the conjugate moiety can be attached to the nitrogen atom of the amine or amide or to an adjacent carbon atom.

[0901] There are numerous methods for preparing conjugates of oligonuclotides. Generally, an oligonucleotide is attached to a conjugate moiety by contacting a reactive group (e.g., OH, SH, amine, carboxyl, aldehyde, and the like) on the oligonucleotide with a reactive group on the conjugate moiety. In some embodiments, one reactive group is electrophilic and the other is nucleophilic.

[0902] For example, an electrophilic group can be a carbonyl-containing functionality and a nucleophilic group can be an amine or thiol. Methods for conjugation of nucleic acids and related oligomeric compounds with and without linking groups are well described in the literature such as, for example, in Manoharan in Antisense Research and Applications, Crooke and LeBleu, eds., CRC Press, Boca Raton, Fla., 1993, Chapter 17, which is incorporated herein by reference in its entirety.

[0903] The ligand can be attached to the dsRNA agent via a linker or a carrier monomer, e.g., a ligand carrier. The carriers include (i) at least one “backbone attachment point,” preferably two “backbone attachment points” and (ii) at least one “tethering attachment point.” A “backbone attachment point” as used herein refers to a functional group, e.g. a hydroxyl group, or generally, a bond available for, and that is suitable for incorporation of the carrier monomer into the backbone, e.g., the phosphate, or modified phosphate, e.g., sulfur containing, backbone, of an oligonucleotide. A “tethering attachment point” (TAP) in refers to an atom of the carrier monomer, e.g., a carbon atom or a heteroatom (distinct from an atom which provides a backbone attachment point), that connects a selected moiety. The selected moiety can be, e.g., a carbohydrate, e.g. monosaccharide, disaccharide, trisaccharide, tetrasaccharide, oligosaccharide and polysaccharide. Optionally, the selected moiety is connected by an intervening tether to the carrier monomer. Thus, the carrier will often include a functional group, e.g., an amino group, or generally, provide a bond, that is suitable for incorporation or tethering of another chemical entity, e.g., a ligand to the constituent atom.

[0904] Representative U.S. patents that teach the preparation of conjugates of nucleic acids include, but are not limited to, U.S. Pat. Nos. 4,828,979; 4,948,882; 5,218,105; 5,525,465; 5,541,313; 5,545,730; 5,552,538; 5,578, 717, 5,580,731; 5,580,731; 5,591,584; 5,109,124; 5,118,802; 5,138,045; 5,414,077; 5,486,603; 5,512,439; 5,578,718; 5,608,046; 4,587,044; 4,605,735; 4,667,025; 4,762,779; 4,789,737; 4,824,941; 4,835,263; 4,876,335; 4,904,582; 4,958,013; 5,082,830; 5,112,963; 5,214,136; 5,082, 830; 5,112,963; 5,149,782; 5,214,136; 5,245,022; 5,254,469; 5,258,506; 5,262,536; 5,272,250; 5,292,873; 5,317,098; 5,371,241, 5,391,723; 5,416,203, 5,451,463; 5,510,475; 5,512,667; 5,514,785; 5,565,552; 5,567,810; 5,574,142; 5,585,481; 5,587,371; 5,595,726; 5,597,696; 5,599,923; 5,599,928; 5,672,662; 5,688,941; 5,714,166; 6,153,737; 6,172,208; 6,300,319; 6,335,434; 6,335,437; 6,395,437; 6,444,806; 6,486,308; 6,525,031; 6,528,631; 6,559,279; contents of which are herein incorporated in their entireties by reference.

[0905] In some embodiments, the dsRNA agent further comprises a targeting ligand that targets a liver tissue. In some embodiments, the targeting ligand is a carbohydrate-based ligand. In one embodiment, the targeting ligand is a GalNAc conjugate.

[0906] In certain embodiments, the dsRNA agent further comprises a ligand having a structure shown below:

[chemical structure]

wherein:
[0907] L^{G} is independently for each occurrence a ligand, e.g., carbohydrate, e.g. monosaccharide, disaccharide, trisaccharide, tetrasaccharide, polysaccharide; and
[0908] Z′, Z″, Z′″ and Z″″ are each independently for each occurrence O or S.

[0909] In certain embodiments, the dsRNA agent comprises a ligand of Formula (II), (III), (IV) or (V):

[chemical structure]

[0910] wherein:
[0911] q^{2A}, q^{2B}, q^{3A}, q^{3B}, q^{4A}, q^{4B}, q^{5A}, q^{5B} and q^{5C} represent independently for each occurrence 0-20 and wherein the repeating unit can be the same or different;
[0912] Q and Q′ are independently for each occurrence is absent, —(P⁷-Q⁷-R⁷)ₚ-T⁷- or -T⁷-Q⁷-T^{7′}-B-T^{8′}-Q⁸-T⁸;
[0913] P^{2A}, p^{2B}, p^{3A}, p^{3B}, p^{4A}, p^{4B}, p^{5A}, p^{5B}, p^{5C}, P⁷, T^{2A}, T^{2B}, T^{3A}, T^{3B}, T^{4A}, T^{4B}, T^{4A}, T^{5B}, T^{5C}, T⁷, T^{7′}, T⁸ and T^{8′} are each independently for each occurrence absent, CO, NH, O, S, OC(O), NHC(O), CH₂, CH₂NH or CH₂O;
[0914] B is —CH₂—N(B^{L})—CH₂—;
[0915] B^{L} is -T^{B}-Q^{B}-T^{B′}-R^{x};
[0916] Q^{2A}, Q^{2B}, Q^{3A}, Q^{3B}, Q^{4A}, Q^{4B}, Q^{5A}, Q^{5B}, Q^{5C}, Q⁷, Q⁸ and Q^{B} are independently for each occurrence absent, alkylene, substituted alkylene and wherein one or more methylenes can be interrupted or terminated by one or more of O, S, S(O), SO₂, N(R^{N}), C(R′)═C(R′), C≡C or C(O);
[0917] T^{B} and T^{B′} are each independently for each occurrence absent, CO, NH, O, S, OC(O), OC(O)O, NHC(O), NHC(O)NH, NHC(O)O, CH₂, CH₂NH or CH₂O;
[0918] R^{x} is a lipophile (e.g., cholesterol, cholic acid, adamantane acetic acid, 1-pyrene butyric acid, dihydrotestosterone, 1,3-Bis-O(hexadecyl)glycerol, geranyloxyhexyl group, hexadecylglycerol, borneol, menthol, 1,3-propanediol, heptadecyl group, palmitic acid, myristic acid, O3-(oleoyl)lithocholic acid, O3-(oleoyl)cholenic acid, dimethoxytrityl, or phenoxazine), a vitamin (e.g., folate, vitamin A, vitamin E, biotin, pyridoxal), a peptide, a carbohydrate (e.g., monosaccharide, disaccharide, trisaccharide, tetrasaccharide, oligosaccharide, polysaccharide), an endosomolytic component, a steroid (e.g., uvaol, hecigenin, diosgenin), a terpene (e.g., triterpene, e.g., sarsasapogenin, Friedelin, epifriedelanol derivatized lithocholic acid), or a cationic lipid;
[0919] R¹, R², R^{2A}, R^{2B}, R^{3A}, R^{3B}, R^{4A}, R^{4B}, R^{5A}, R^{5B}, R^{5C}, R⁷ are each independently for each occurrence absent, NH, O, S, CH₂, C(O)O, C(O)NH, NHCH(R^{a})C(O), —C(O)—CH(R^{a})—NH—, CO, CH═N—O,

[chemical structure]

or heterocyclyl;
[0920] L¹, L^{2A}, L^{2B}, L^{3A}, L^{3B}, L^{4A}, L^{4B}, L^{5A}, L^{5B} and L^{5C} are each independently for each occurrence a carbohydrate, e.g., monosaccharide, disaccharide, trisaccharide, tetrasaccharide, oligosaccharide and polysaccharide;
[0921] R′ and R″ are each independently H, C₁-C₆ alkyl, OH, SH, or N(R^{N})₂;
[0922] R^{N} is independently for each occurrence H, methyl, ethyl, propyl, isopropyl, butyl or benzyl;
[0923] R^{a} is H or amino acid side chain;
[0924] Z′, Z″, Z′″ and Z″″ are each independently for each occurrence O or S;
[0925] p represent independently for each occurrence 0-20.

[0926] As discussed above, because the ligand can be conjugated to the dsRNA agent via a linker or carrier, and because the linker or carrier can contain a branched linker, the dsRNA agent can then contain multiple ligands via the same or different backbone attachment points to the carrier, or via the branched linker(s). For instance, the branchpoint of the branched linker may be a bivalent, trivalent, tetravalent, pentavalent, or hexavalent atom, or a group presenting such multiple valencies. In certain embodiments, the branchpoint is —N, —N(Q)-C, —O—C, —S—C, —SS—C, —C(O)N(Q)-C, —OC(O)N(Q)-C, —N(Q)C(O)—C, or —N(Q)C(O)O—C; wherein Q is independently for each occurrence H or optionally substituted alkyl. In other embodiment, the branchpoint is glycerol or glycerol derivative.

[0927] In certain embodiments, the dsRNA agent comprises a ligand of structure:

[chemical structure]

[0928] In certain embodiments, the dsRNA agent comprises a ligand of structure:

[chemical structure]

[0929] In certain embodiments, the dsRNA agent comprises a ligand of structure:

[chemical structure]

[0930] In certain embodiments, the dsRNA agent comprises a ligand of structure:

[chemical structure]

[0931] In certain embodiments, the dsRNA agent comprises a ligand of structure:

[chemical structure]

[0932] In certain embodiments, the dsRNA agent comprises a ligand of structure:

[chemical structure]

[0933] In certain embodiments, the dsRNA agent comprises a ligand of structure:

[chemical structure]

[0934] In certain embodiments, the dsRNA agent comprises a ligand of structure:

[chemical structure]

[0935] In certain embodiments, the dsRNA agent comprises a ligand of structure:

[chemical structure]

[0936] In certain embodiments, the dsRNA agent comprises a ligand of structure:

[chemical structure]

[0937] In certain embodiments, the dsRNA agent comprises a ligand of structure:

[chemical structure]

[0938] In certain embodiments, the dsRNA agent comprises a monomer of structure:

[chemical structure]

[0939] In certain embodiments, the dsRNA agent comprises a ligand of structure:

[chemical structure]

### Exemplary Ligand Monomers

[0940] In certain embodiments, the dsRNA agent comprises a monomer of structure:

[chemical structure]

[0941] In certain embodiments, the dsRNA agent comprises a monomer of structure:

[chemical structure]

[0942] In certain embodiments, the dsRNA agent comprises a monomer of structure:

[chemical structure]

[0943] In certain embodiments, the dsRNA agent comprises a monomer of structure:

[chemical structure]

[0944] In certain embodiments, the dsRNA agent comprises a ligand of structure:

[chemical structure]

[0945] In certain embodiments, the dsRNA agent comprises a monomer of structure:

[chemical structure]

[0946] In certain embodiments, the dsRNA agent comprises a ligand of structure:

[chemical structure]

[0947] In certain embodiments, the dsRNA agent comprises a ligand of structure:

[chemical structure]

[0948] In certain embodiments, the dsRNA agent comprises a ligand of structure:

[chemical structure]

[0949] In certain embodiments, the dsRNA agent comprises a ligand of structure:

[chemical structure]

[0950] In certain embodiments, the dsRNA agent comprises a ligand of structure:

[chemical structure]

[0951] In certain embodiments, the dsRNA agent comprises a ligand of structure:

[chemical structure]

[0952] In certain embodiments, the dsRNA agent comprises a ligand of structure:

[chemical structure]

[0953] In certain embodiments, the dsRNA agent comprises a ligand of structure:

[chemical structure]

[0954] In certain embodiments, the dsRNA agent comprises a ligand of structure:

[chemical structure]

[0955] In certain embodiments, the dsRNA agent comprises a monomer of structure:

[chemical structure]

[0956] In certain embodiments, the dsRNA agent comprises a monomer of structure:

[chemical structure]

[0957] In certain embodiments, the dsRNA agent comprises a monomer of structure:

[chemical structure]

[0958] In certain embodiments, the dsRNA agent comprises a monomer of structure:

[chemical structure]

[0959] In certain embodiments, the dsRNA agent comprises a monomer of structure:

[chemical structure]

[0960] In certain embodiments, the dsRNA agent comprises a monomer of structure:

[chemical structure]

[0961] In some embodiments both L^{2A} and L^{2B} are different.

[0962] In some preferred embodiments both L^{3A} and L^{3B} are the same.

[0963] In some embodiments both L^{3A} and L^{3B} are different.

[0964] In some preferred embodiments both L^{4A} and L^{4B} are the same.

[0965] In some embodiments both L^{4A} and L^{4B} are different.

[0966] In some preferred embodiments all of L^{5A}, L^{5B} and L^{5C} are the same.

[0967] In some embodiments two of L^{5A}, L^{5B} and L^{5C} are the same

[0968] In some embodiments L^{5A} and L^{5B} are the same.

[0969] In some embodiments L^{5A} and L^{5C} are the same.

[0970] In some embodiments L^{5B} and L^{5C} are the same.

[0971] In certain embodiments, the dsRNA agent comprises a monomer of structure:

[chemical structure]

[0972] In certain embodiments, the dsRNA agent comprises a monomer of structure:

[chemical structure]

[0973] In certain embodiments, the dsRNA agent comprises a monomer of structure:

[chemical structure]

[0974] In certain embodiments, the dsRNA agent comprises a monomer of structure:

[chemical structure]

wherein Y is O or S, and n is 1-6.

[0975] In certain embodiments, the dsRNA agent comprises a monomer of structure:

[chemical structure]

herein Y is O or S, n is 1-6, R is hydrogen or nucleic acid, and R′ is nucleic acid.

[0976] In certain embodiments, the dsRNA agent comprises a monomer of structure:

[chemical structure]

wherein Y is O or S, and n is 1-6.

[0977] In certain embodiments, the dsRNA agent comprises a monomer of structure:

[chemical structure]

wherein Y is O or S, n is 2-6, x is 1-6, and A is H or a phosphate linkage.

[0978] In certain embodiments, the dsRNA agent comprises at least 1, 2, 3 or 4 monomer of structure:

[chemical structure]

[0979] In certain embodiments, the dsRNA agent comprises a monomer of structure:

[chemical structure]

wherein X is O or S.

[0980] In certain embodiments, the dsRNA agent comprises a monomer of structure:

[chemical structure]

wherein x is 1-12.

[0981] In certain embodiments, the dsRNA agent comprises a monomer of structure:

[chemical structure]

wherein R is OH or NHCOCH₃.

[0982] In certain embodiments, the dsRNA agent comprises a monomer of structure:

[chemical structure]

wherein R is OH or NHCOCH₃.

[0983] In certain embodiments, the dsRNA agent comprises a monomer of structure:

[chemical structure]

wherein R is O or S.

[0984] In certain embodiments, the dsRNA agent comprises a monomer of structure:

[chemical structure]

wherein R is OH or NHCOCH₃.

[0985] In certain embodiments, the dsRNA agent comprises a monomer of structure:

[chemical structure]

[0986] In certain embodiments, the dsRNA agent comprises a monomer of structure:

[chemical structure]

wherein R is OH or NHCOCH₃.

[0987] In certain embodiments, the dsRNA agent comprises a monomer of structure:

[chemical structure]

wherein R is OH or NHCOCH₃.

[0988] In certain embodiments, the dsRNA agent comprises a monomer of structure:

[chemical structure]

wherein R is OH or NHCOCH₃.

[0989] In certain embodiments, the dsRNA agent comprises a monomer of structure:

[chemical structure]

wherein R is OH or NHCOCH₃.

[0990] In certain embodiments, the dsRNA agent comprises a monomer of structure:

[chemical structure]

[0991] In the above described monomers, X and Y are each independently for each occurrence H, a protecting group, a phosphate group, a phosphodiester group, an activated phosphate group, an activated phosphite group, a phosphoramidite, a solid support, —P(Z′)(Z″)O-nucleoside, —P(Z′)(Z″)O-oligonucleotide, a lipid, a PEG, a steroid, a polymer, a nucleotide, a nucleoside, or an oligonucleotide; and Z′ and Z″ are each independently for each occurrence O or S.

[0992] In certain embodiments, the dsRNA agent is conjugated with a ligand of structure:

[chemical structure]

[0993] In certain embodiments, the dsRNA agent comprises a ligand of structure:

[chemical structure]

[0994] In certain embodiments, the dsRNA agent comprises a monomer of structure:

[chemical structure]

Synthesis of above described ligands and monomers is described, for example, in U.S. Pat. No. 8,106,022, content of which is incorporated herein by reference in its entirety.
Evaluation of Candidate iRNAs

[0995] One can evaluate a candidate iRNA agent, e.g., a modified RNA, for a selected property by exposing the agent or modified molecule and a control molecule to the appropriate conditions and evaluating for the presence of the selected property. For example, resistance to a degradent can be evaluated as follows. A candidate modified RNA (and a control molecule, usually the unmodified form) can be exposed to degradative conditions, e.g., exposed to a milieu, which includes a degradative agent, e.g., a nuclease. E.g., one can use a biological sample, e.g., one that is similar to a milieu, which might be encountered, in therapeutic use, e.g., blood or a cellular fraction, e.g., a cell-free homogenate or disrupted cells. The candidate and control could then be evaluated for resistance to degradation by any of a number of approaches. For example, the candidate and control could be labeled prior to exposure, with, e.g., a radioactive or enzymatic label, or a fluorescent label, such as Cy3 or Cy5. Control and modified RNA's can be incubated with the degradative agent, and optionally a control, e.g., an inactivated, e.g., heat inactivated, degradative agent. A physical parameter, e.g., size, of the modified and control molecules are then determined. They can be determined by a physical method, e.g., by polyacrylamide gel electrophoresis or a sizing column, to assess whether the molecule has maintained its original length, or assessed functionally. Alternatively, Northern blot analysis can be used to assay the length of an unlabeled modified molecule.

[0996] A functional assay can also be used to evaluate the candidate agent. A functional assay can be applied initially or after an earlier non-functional assay, (e.g., assay for resistance to degradation) to determine if the modification alters the ability of the molecule to silence gene expression. For example, a cell, e.g., a mammalian cell, such as a mouse or human cell, can be co-transfected with a plasmid expressing a fluorescent protein, e.g., GFP, and a candidate RNA agent homologous to the transcript encoding the fluorescent protein (see, e.g., WO 00/44914). For example, a modified dsiRNA homologous to the GFP mRNA can be assayed for the ability to inhibit GFP expression by monitoring for a decrease in cell fluorescence, as compared to a control cell, in which the transfection did not include the candidate dsiRNA, e.g., controls with no agent added and/or controls with a non-modified RNA added. Efficacy of the candidate agent on gene expression can be assessed by comparing cell fluorescence in the presence of the modified and unmodified dssiRNA compounds.

[0997] In an alternative functional assay, a candidate dssiRNA compound homologous to an endogenous mouse gene, for example, a maternally expressed gene, such as c-mos, can be injected into an immature mouse oocyte to assess the ability of the agent to inhibit gene expression in vivo (see, e.g., WO 01/36646). A phenotype of the oocyte, e.g., the ability to maintain arrest in metaphase II, can be monitored as an indicator that the agent is inhibiting expression. For example, cleavage of c-mos mRNA by a dssiRNA compound would cause the oocyte to exit metaphase arrest and initiate parthenogenetic development (Colledge et al. Nature 370: 65-68, 1994; Hashimoto et al. Nature, 370:68-71, 1994). The effect of the modified agent on target RNA levels can be verified by Northern blot to assay for a decrease in the level of target mRNA, or by Western blot to assay for a decrease in the level of target protein, as compared to a negative control. Controls can include cells in which with no agent is added and/or cells in which a non-modified RNA is added.

### Physiological Effects

[0998] The siRNA compounds described herein can be designed such that determining therapeutic toxicity is made easier by the complementarity of the siRNA with both a human and a non-human animal sequence. By these methods, an siRNA can consist of a sequence that is fully complementary to a nucleic acid sequence from a human and a nucleic acid sequence from at least one non-human animal, e.g., a non-human mammal, such as a rodent, ruminant or primate. For example, the non-human mammal can be a mouse, rat, dog, pig, goat, sheep, cow, monkey, Pan paniscus, Pan troglodytes, Macaca mulatto, or Cynomolgus monkey. The sequence of the siRNA compound could be complementary to sequences within homologous genes, e.g., oncogenes or tumor suppressor genes, of the non-human mammal and the human. By determining the toxicity of the siRNA compound in the non-human mammal, one can extrapolate the toxicity of the siRNA compound in a human. For a more strenuous toxicity test, the siRNA can be complementary to a human and more than one, e.g., two or three or more, non-human animals.

[0999] The methods described herein can be used to correlate any physiological effect of an siRNA compound on a human, e.g., any unwanted effect, such as a toxic effect, or any positive, or desired effect.

Increasing Cellular Uptake of siRNAs

[1000] Described herein are various siRNA compositions that contain covalently attached conjugates that increase cellular uptake and/or intracellular targeting of the siRNAs.

[1001] Additionally provided are methods that include administering an siRNA compound and a drug that affects the uptake of the siRNA into the cell. The drug can be administered before, after, or at the same time that the siRNA compound is administered. The drug can be covalently or non-covalently linked to the siRNA compound. The drug can be, for example, a lipopolysaccharide, an activator of p38 MAP kinase, or an activator of NF-κB. The drug can have a transient effect on the cell. The drug can increase the uptake of the siRNA compound into the cell, for example, by disrupting the cell's cytoskeleton, e.g., by disrupting the cell's microtubules, microfilaments, and/or intermediate filaments. The drug can be, for example, taxon, vincristine, vinblastine, cytochalasin, nocodazole, japlakinolide, latrunculin A, phalloidin, swinholide A, indanocine, or myoservin. The drug can also increase the uptake of the siRNA compound into a given cell or tissue by activating an inflammatory response, for example. Exemplary drugs that would have such an effect include tumor necrosis factor alpha (TNFalpha), interleukin-1 beta, a CpG motif, gamma interferon or more generally an agent that activates a toll-like receptor.

siRNA Production

[1002] An siRNA can be produced, e.g., in bulk, by a variety of methods. Exemplary methods include: organic synthesis and RNA cleavage, e.g., in vitro cleavage.

[1003] Organic Synthesis. An siRNA can be made by separately synthesizing a single stranded RNA molecule, or each respective strand of a double-stranded RNA molecule, after which the component strands can then be annealed.

[1004] A large bioreactor, e.g., the OligoPilot II from Pharmacia Biotec AB (Uppsala Sweden), can be used to produce a large amount of a particular RNA strand for a given siRNA. The OligoPilotII reactor can efficiently couple a nucleotide using only a 1.5 molar excess of a phosphoramidite nucleotide. To make an RNA strand, ribonucleotides amidites are used. Standard cycles of monomer addition can be used to synthesize the 21 to 23 nucleotide strand for the siRNA. Typically, the two complementary strands are produced separately and then annealed, e.g., after release from the solid support and deprotection.

[1005] Organic synthesis can be used to produce a discrete siRNA species. The complementary of the species to a particular target gene can be precisely specified. For example, the species may be complementary to a region that includes a polymorphism, e.g., a single nucleotide polymorphism. Further the location of the polymorphism can be precisely defined. In some embodiments, the polymorphism is located in an internal region, e.g., at least 4, 5, 7, or 9 nucleotides from one or both of the termini.

[1006] dsiRNA Cleavage. siRNAs can also be made by cleaving a larger siRNA. The cleavage can be mediated in vitro or in vivo. For example, to produce iRNAs by cleavage in vitro, the following method can be used:

[1007] In vitro transcription. dsiRNA is produced by transcribing a nucleic acid (DNA) segment in both directions. For example, the HiScribe™ RNAi transcription kit (New England Biolabs) provides a vector and a method for producing a dsiRNA for a nucleic acid segment that is cloned into the vector at a position flanked on either side by a T7 promoter. Separate templates are generated for T7 transcription of the two complementary strands for the dsiRNA. The templates are transcribed in vitro by addition of T7 RNA polymerase and dsiRNA is produced. Similar methods using PCR and/or other RNA polymerases (e.g., T3 or SP6 polymerase) can also be dotoxins that may contaminate preparations of the recombinant enzymes.

[1008] In Vitro Cleavage. In one embodiment, RNA generated by this method is carefully purified to remove endsiRNA is cleaved in vitro into siRNAs, for example, using a Dicer or comparable RNAse III-based activity. For example, the dsiRNA can be incubated in an in vitro extract from Drosophila or using purified components, e.g., a purified RNAse or RISC complex (RNA-induced silencing complex). See, e.g., Ketting et al. Genes Dev 2001 Oct. 15; 15(20):2654-9. and Hammond Science 2001 Aug. 10; 293(5532):1146-50.

[1009] dsiRNA cleavage generally produces a plurality of siRNA species, each being a particular 21 to 23 nt fragment of a source dsiRNA molecule. For example, siRNAs that include sequences complementary to overlapping regions and adjacent regions of a source dsiRNA molecule may be present.

[1010] Regardless of the method of synthesis, the siRNA preparation can be prepared in a solution (e.g., an aqueous and/or organic solution) that is appropriate for formulation. For example, the siRNA preparation can be precipitated and redissolved in pure double-distilled water, and lyophilized. The dried siRNA can then be resuspended in a solution appropriate for the intended formulation process.

### Making Double-Stranded RNA Agents Conjugated to a Lipophilic Moiety

[1011] In some embodiments, the lipophilic moiety is conjugated to the dsRNA agent via a nucleobase, sugar moiety, or internucleosidic linkage.

[1012] Conjugation to purine nucleobases or derivatives thereof can occur at any position including, endocyclic and exocyclic atoms. In some embodiments, the 2-, 6-, 7-, or 8-positions of a purine nucleobase are attached to a conjugate moiety. Conjugation to pyrimidine nucleobases or derivatives thereof can also occur at any position. In some embodiments, the 2-, 5-, and 6-positions of a pyrimidine nucleobase can be substituted with a conjugate moiety. When a lipophilic moiety is conjugated to a nucleobase, the preferred position is one that does not interfere with hybridization, i.e., does not interfere with the hydrogen bonding interactions needed for base pairing. In one embodiment, the lipophilic moieties may be conjugated to a nucleobase via a linker containing an alkyl, alkenyl or amide linkage. Exemplary conjugations of the lipophilic moieties to the nucleobase are illustrated in FIG. 1 and Example 7 of WO 2019/217459, which is incorporated herein by reference in its entirety.

[1013] Conjugation to sugar moieties of nucleosides can occur at any carbon atom. Exemplary carbon atoms of a sugar moiety that a lipophilic moiety can be attached to include the 2′, 3′, and 5′ carbon atoms. A lipophilic moiety can also be attached to the 1′ position, such as in an abasic residue. In one embodiment, the lipophilic moieties may be conjugated to a sugar moiety, via a 2′-O modification, with or without a linker. Exemplary conjugations of the lipophilic moieties to the sugar moiety (via a 2′-O modification) are illustrated in FIG. 1 and Examples 1, 2, 3, and 6 of WO 2019/217459, which is incorporated herein by reference in its entirety.

[1014] Internucleosidic linkages can also bear lipophilic moieties. For phosphorus-containing linkages (e.g., phosphodiester, phosphorothioate, phosphorodithiotate, phosphoroamidate, and the like), the lipophilic moiety can be attached directly to the phosphorus atom or to an O, N, or S atom bound to the phosphorus atom. For amine- or amide-containing internucleosidic linkages (e.g., PNA), the lipophilic moiety can be attached to the nitrogen atom of the amine or amide or to an adjacent carbon atom.

[1015] There are numerous methods for preparing conjugates of oligonuclotides. Generally, an oligonucleotide is attached to a conjugate moiety by contacting a reactive group (e.g., OH, SH, amine, carboxyl, aldehyde, and the like) on the oligonucleotide with a reactive group on the conjugate moiety. In some embodiments, one reactive group is electrophilic and the other is nucleophilic.

[1016] For example, an electrophilic group can be a carbonyl-containing functionality and a nucleophilic group can be an amine or thiol. Methods for conjugation of nucleic acids and related oligomeric compounds with and without linking groups are well described in the literature such as, for example, in Manoharan in Antisense Research and Applications, Crooke and LeBleu, eds., CRC Press, Boca Raton, Fla., 1993, Chapter 17, which is incorporated herein by reference in its entirety.

[1017] In one embodiment, a first (complementary) RNA strand and a second (sense) RNA strand can be synthesized separately, wherein one of the RNA strands comprises a pendant lipophilic moiety, and the first and second RNA strands can be mixed to form a dsRNA. The step of synthesizing the RNA strand preferably involves solid-phase synthesis, wherein individual nucleotides are joined end to end through the formation of internucleotide 3′-5′ phosphodiester bonds in consecutive synthesis cycles.

[1018] In one embodiment, a lipophilic molecule having a phosphoramidite group is coupled to the 3′-end or 5′-end of either the first (complementary) or second (sense) RNA strand in the last synthesis cycle. In the solid-phase synthesis of an RNA, the nucleotides are initially in the form of nucleoside phosphoramidites. In each synthesis cycle, a further nucleoside phosphoramidite is linked to the —OH group of the previously incorporated nucleotide. If the lipophilic molecule has a phosphoramidite group, it can be coupled in a manner similar to a nucleoside phosphoramidite to the free OH end of the RNA synthesized previously in the solid-phase synthesis. The synthesis can take place in an automated and standardized manner using a conventional RNA synthesizer. Synthesis of the lipophilic molecule having the phosphoramidite group may include phosphitylation of a free hydroxyl to generate the phosphoramidite group.

[1019] Synthesis procedures of lipophilic moiety-conjugated phosphoramidites are exemplified in Examples 1, 2, 4, 5, 6, and 7. Examples of procedures of post-synthesis conjugation of lipophilic moieties or other ligands are illustrated in Example 3 of WO 2019/217459, which is incorporated herein by reference in its entirety.

[1020] In general, the oligonucleotides can be synthesized using protocols known in the art, for example, as described in Caruthers et al., Methods in Enzymology (1992) 211:3-19; WO 99/54459; Wincott et al., Nucl. Acids Res. (1995) 23:2677-2684; Wincott et al., Methods Mol. Bio., (1997) 74:59; Brennan et al., Biotechnol. Bioeng. (1998) 61:33-45; and U.S. Pat. No. 6,001,311; each of which is hereby incorporated by reference in its entirety. In general, the synthesis of oligonucleotides involves conventional nucleic acid protecting and coupling groups, such as dimethoxytrityl at the 5′-end, and phosphoramidites at the 3′-end. In a non-limiting example, small scale syntheses are conducted on a Expedite 8909 RNA synthesizer sold by Applied Biosystems, Inc. (Weiterstadt, Germany), using ribonucleoside phosphoramidites sold by ChemGenes Corporation (Ashland, Mass.). Alternatively, syntheses can be performed on a 96-well plate synthesizer, such as the instrument produced by Protogene (Palo Alto, Calif), or by methods such as those described in Usman et al., J. Am. Chem. Soc. (1987) 109:7845; Scaringe, et al., Nucl. Acids Res. (1990) 18:5433; Wincott, et al., Nucl. Acids Res. (1990) 23:2677-2684; and Wincott, et al., Methods Mol. Bio. (1997) 74:59, each of which is hereby incorporated by reference in its entirety.

[1021] The nucleic acid molecules of the present invention may be synthesized separately and joined together post-synthetically, for example, by ligation (Moore et al., Science (1992) 256:9923; WO 93/23569; Shabarova et al., Nucl. Acids Res. (1991) 19:4247; Bellon et al., Nucleosides & Nucleotides (1997) 16:951; Bellon et al., Bioconjugate Chem. (1997) 8:204; or by hybridization following synthesis and/or deprotection. The nucleic acid molecules can be purified by gel electrophoresis using conventional methods or can be purified by high pressure liquid chromatography (HPLC; see Wincott et al., supra, the totality of which is hereby incorporated herein by reference) and re-suspended in water.

### Pharmaceutical Compostions

[1022] In one aspect, the invention features a pharmaceutical composition that includes an siRNA compound, e.g., a double-stranded siRNA compound, or ssiRNA compound, (e.g., a precursor, e.g., a larger siRNA compound which can be processed into a ssiRNA compound, or a DNA which encodes an siRNA compound, e.g., a double-stranded siRNA compound, or ssiRNA compound, or precursor thereof) including a nucleotide sequence complementary to a target RNA, e.g., substantially and/or exactly complementary. The target RNA can be a transcript of an endogenous human gene. In one embodiment, the siRNA compound (a) is 19-25 nucleotides long, for example, 21-23 nucleotides, (b) is complementary to an endogenous target RNA, and, optionally, (c) includes at least one 3′ overhang 1-5 nt long. In one embodiment, the pharmaceutical composition can be an emulsion, microemulsion, cream, jelly, or liposome.

[1023] In one example the pharmaceutical composition includes an siRNA compound mixed with a topical delivery agent. The topical delivery agent can be a plurality of microscopic vesicles. The microscopic vesicles can be liposomes. In some embodiments the liposomes are cationic liposomes.

[1024] In another aspect, the pharmaceutical composition includes an siRNA compound, e.g., a double-stranded siRNA compound, or ssiRNA compound (e.g., a precursor, e.g., a larger siRNA compound which can be processed into a ssiRNA compound, or a DNA which encodes an siRNA compound, e.g., a double-stranded siRNA compound, or ssiRNA compound, or precursor thereof) admixed with a topical penetration enhancer. In one embodiment, the topical penetration enhancer is a fatty acid. The fatty acid can be arachidonic acid, oleic acid, lauric acid, caprylic acid, capric acid, myristic acid, palmitic acid, stearic acid, linoleic acid, linolenic acid, dicaprate, tricaprate, monolein, dilaurin, glyceryl 1-monocaprate, 1-dodecylazacycloheptan-2-one, an acylcarnitine, an acylcholine, or a C₁₋₁₀ alkyl ester, monoglyceride, diglyceride or pharmaceutically acceptable salt thereof.

[1025] In another embodiment, the topical penetration enhancer is a bile salt. The bile salt can be cholic acid, dehydrocholic acid, deoxycholic acid, glucholic acid, glycholic acid, glycodeoxycholic acid, taurocholic acid, taurodeoxycholic acid, chenodeoxycholic acid, ursodeoxycholic acid, sodium tauro-24,25-dihydro-fusidate, sodium glycodihydrofusidate, polyoxyethylene-9-lauryl ether or a pharmaceutically acceptable salt thereof.

[1026] In another embodiment, the penetration enhancer is a chelating agent. The chelating agent can be EDTA, citric acid, a salicyclate, a N-acyl derivative of collagen, laureth-9, an N-amino acyl derivative of a beta-diketone or a mixture thereof.

[1027] In another embodiment, the penetration enhancer is a surfactant, e.g., an ionic or nonionic surfactant. The surfactant can be sodium lauryl sulfate, polyoxyethylene-9-lauryl ether, polyoxyethylene-20-cetyl ether, a perfluorchemical emulsion or mixture thereof.

[1028] In another embodiment, the penetration enhancer can be selected from a group consisting of unsaturated cyclic ureas, 1-alkyl-alkones, 1-alkenylazacyclo-alakanones, steroidal anti-inflammatory agents and mixtures thereof. In yet another embodiment the penetration enhancer can be a glycol, a pyrrol, an azone, or a terpenes.

[1029] In one aspect, the invention features a pharmaceutical composition including an siRNA compound, e.g., a double-stranded siRNA compound, or ssiRNA compound, (e.g., a precursor, e.g., a larger siRNA compound which can be processed into a ssiRNA compound, or a DNA which encodes an siRNA compound, e.g., a double-stranded siRNA compound, or ssiRNA compound, or precursor thereof) in a form suitable for oral delivery. In one embodiment, oral delivery can be used to deliver an siRNA compound composition to a cell or a region of the gastro-intestinal tract, e.g., small intestine, colon (e.g., to treat a colon cancer), and so forth. The oral delivery form can be tablets, capsules or gel capsules. In one embodiment, the siRNA compound of the pharmaceutical composition modulates expression of a cellular adhesion protein, modulates a rate of cellular proliferation, or has biological activity against eukaryotic pathogens or retroviruses. In another embodiment, the pharmaceutical composition includes an enteric material that substantially prevents dissolution of the tablets, capsules or gel capsules in a mammalian stomach. In some embodiments the enteric material is a coating. The coating can be acetate phthalate, propylene glycol, sorbitan monoleate, cellulose acetate trimellitate, hydroxy propyl methylcellulose phthalate or cellulose acetate phthalate.

[1030] In another embodiment, the oral dosage form of the pharmaceutical composition includes a penetration enhancer. The penetration enhancer can be a bile salt or a fatty acid. The bile salt can be ursodeoxycholic acid, chenodeoxycholic acid, and salts thereof. The fatty acid can be capric acid, lauric acid, and salts thereof.

[1031] In another embodiment, the oral dosage form of the pharmaceutical composition includes an excipient. In one example the excipient is polyethyleneglycol. In another example the excipient is precirol.

[1032] In another embodiment, the oral dosage form of the pharmaceutical composition includes a plasticizer. The plasticizer can be diethyl phthalate, triacetin dibutyl sebacate, dibutyl phthalate or triethyl citrate.

[1033] In one aspect, the invention features a pharmaceutical composition including an siRNA compound and a delivery vehicle. In one embodiment, the siRNA compound is (a) is 19-25 nucleotides long, for example, 21-23 nucleotides, (b) is complementary to an endogenous target RNA, and, optionally, (c) includes at least one 3′ overhang 1-5 nucleotides long.

[1034] In one embodiment, the delivery vehicle can deliver an siRNA compound, e.g., a double-stranded siRNA compound, or ssiRNA compound, (e.g., a precursor, e.g., a larger siRNA compound which can be processed into a ssiRNA compound, or a DNA which encodes an siRNA compound, e.g., a double-stranded siRNA compound, or ssiRNA compound, or precursor thereof) to a cell by a topical route of administration. The delivery vehicle can be microscopic vesicles. In one example the microscopic vesicles are liposomes. In some embodiments the liposomes are cationic liposomes. In another example the microscopic vesicles are micelles. In one aspect, the invention features a pharmaceutical composition including an siRNA compound, e.g., a double-stranded siRNA compound, or ssiRNA compound, (e.g., a precursor, e.g., a larger siRNA compound which can be processed into a ssiRNA compound, or a DNA which encodes an siRNA compound, e.g., a double-stranded siRNA compound, or ssiRNA compound, or precursor thereof) in an injectable dosage form. In one embodiment, the injectable dosage form of the pharmaceutical composition includes sterile aqueous solutions or dispersions and sterile powders. In some embodiments the sterile solution can include a diluent such as water; saline solution; fixed oils, polyethylene glycols, glycerin, or propylene glycol.

[1035] In one aspect, the invention features a pharmaceutical composition including an siRNA compound, e.g., a double-stranded siRNA compound, or ssiRNA compound, (e.g., a precursor, e.g., a larger siRNA compound which can be processed into a ssiRNA compound, or a DNA which encodes an siRNA compound, e.g., a double-stranded siRNA compound, or ssiRNA compound, or precursor thereof) in oral dosage form. In one embodiment, the oral dosage form is selected from the group consisting of tablets, capsules and gel capsules. In another embodiment, the pharmaceutical composition includes an enteric material that substantially prevents dissolution of the tablets, capsules or gel capsules in a mammalian stomach. In some embodiments the enteric material is a coating. The coating can be acetate phthalate, propylene glycol, sorbitan monoleate, cellulose acetate trimellitate, hydroxy propyl methyl cellulose phthalate or cellulose acetate phthalate. In one embodiment, the oral dosage form of the pharmaceutical composition includes a penetration enhancer, e.g., a penetration enhancer described herein.

[1036] In another embodiment, the oral dosage form of the pharmaceutical composition includes an excipient. In one example the excipient is polyethyleneglycol. In another example the excipient is precirol.

[1037] In another embodiment, the oral dosage form of the pharmaceutical composition includes a plasticizer. The plasticizer can be diethyl phthalate, triacetin dibutyl sebacate, dibutyl phthalate or triethyl citrate.

[1038] In one aspect, the invention features a pharmaceutical composition including an siRNA compound, e.g., a double-stranded siRNA compound, or ssiRNA compound, (e.g., a precursor, e.g., a larger siRNA compound which can be processed into a ssiRNA compound, or a DNA which encodes an siRNA compound, e.g., a double-stranded siRNA compound, or ssiRNA compound, or precursor thereof) in a rectal dosage form. In one embodiment, the rectal dosage form is an enema. In another embodiment, the rectal dosage form is a suppository.

[1039] In one aspect, the invention features a pharmaceutical composition including an siRNA compound, e.g., a double-stranded siRNA compound, or ssiRNA compound, (e.g., a precursor, e.g., a larger siRNA compound which can be processed into a ssiRNA compound, or a DNA which encodes an siRNA compound, e.g., a double-stranded siRNA compound, or ssiRNA compound, or precursor thereof) in a vaginal dosage form. In one embodiment, the vaginal dosage form is a suppository. In another embodiment, the vaginal dosage form is a foam, cream, or gel.

[1040] In one aspect, the invention features a pharmaceutical composition including an siRNA compound, e.g., a double-stranded siRNA compound, or ssiRNA compound, (e.g., a precursor, e.g., a larger siRNA compound which can be processed into a ssiRNA compound, or a DNA which encodes an siRNA compound, e.g., a double-stranded siRNA compound, or ssiRNA compound, or precursor thereof) in a pulmonary or nasal dosage form. In one embodiment, the siRNA compound is incorporated into a particle, e.g., a macroparticle, e.g., a microsphere. The particle can be produced by spray drying, lyophilization, evaporation, fluid bed drying, vacuum drying, or a combination thereof. The microsphere can be formulated as a suspension, a powder, or an implantable solid.

### Treatment Methods and Routes of Delivery

[1041] Another aspect of the invention relates to a method of reducing the expression of a target gene in a cell, comprising contacting said cell with the dsRNA agent. In one embodiment, the cell is an extrahepatic cell.

[1042] Another aspect of the invention relates to a method of reducing the expression of a target gene in a subject, comprising administering to the subject the dsRNA agent.

[1043] Another aspect of the invention relates to a method of treating a subject having a CNS disorder, comprising administering to the subject a therapeutically effective amount of the double-stranded RNAi agent of the invention, thereby treating the subject. Exemplary CNS disorders that can be treated by the method of the invention include alzheimer, amyotrophic lateral schlerosis (ALS), frontotemporal dementia, huntington, Parkinson, spinocerebellar, prion, and lafora.

[1044] The dsRNA agent can be delivered to a subject by a variety of routes, depending on the type of genes targeted and the type of disorders to be treated. In some embodiments, the dsRNA agent is administered extrahepatically, such as an ocular administration (e.g., intravitreal administration) or an intrathecal administration.

[1045] In one embodiment, the dsRNA agent is administered intrathecally. By intrathecal administration of the double-stranded iRNA agent, the method can reduce the expression of a target gene in a brain or spine tissue, for instance, cortex, cerebellum, cervical spine, lumbar spine, and thoracic spine.

[1046] In some embodiments, exemplary target genes are APP, ATXN2, C9orf72, TARDBP, MAPT(Tau), HTT, SNCA, FUS, ATXN3, ATXN1, SCA1, SCA7, SCA8, MeCP2, PRNP, SOD1, DMPK, and TTR. To reduce the expression of these target genes in the subject, the dsRNA agent can be administered intravitreally. By intravitreal administration of the double-stranded iRNA agent, the method can reduce the expression of the target gene in an ocular tissue.

[1047] For ease of exposition the formulations, compositions and methods in this section are discussed largely with regard to modified siRNA compounds. It may be understood, however, that these formulations, compositions and methods can be practiced with other siRNA compounds, e.g., unmodified siRNA compounds, and such practice is within the invention. A composition that includes a iRNA can be delivered to a subject by a variety of routes. Exemplary routes include: intravenous, topical, rectal, anal, vaginal, nasal, pulmonary, ocular.

[1048] The dsRNA agent can be incorporated into pharmaceutical compositions suitable for administration. Such compositions typically include one or more species of iRNA and a pharmaceutically acceptable carrier. As used herein the language “pharmaceutically acceptable carrier” is intended to include any and all solvents, dispersion media, coatings, antibacterial and antifungal agents, isotonic and absorption delaying agents, and the like, compatible with pharmaceutical administration. The use of such media and agents for pharmaceutically active substances is well known in the art. Except insofar as any conventional media or agent is incompatible with the active compound, use thereof in the compositions is contemplated. Supplementary active compounds can also be incorporated into the compositions.

[1049] The pharmaceutical compositions of the present invention may be administered in a number of ways depending upon whether local or systemic treatment is desired and upon the area to be treated. Administration may be topical (including ophthalmic, vaginal, rectal, intranasal, transdermal), oral or parenteral. Parenteral administration includes intravenous drip, subcutaneous, intraperitoneal or intramuscular injection, or intrathecal or intraventricular administration.

[1050] The route and site of administration may be chosen to enhance targeting. For example, to target muscle cells, intramuscular injection into the muscles of interest would be a logical choice. Lung cells might be targeted by administering the iRNA in aerosol form. The vascular endothelial cells could be targeted by coating a balloon catheter with the iRNA and mechanically introducing the DNA.

[1051] Formulations for topical administration may include transdermal patches, ointments, lotions, creams, gels, drops, suppositories, sprays, liquids and powders. Conventional pharmaceutical carriers, aqueous, powder or oily bases, thickeners and the like may be necessary or desirable. Coated condoms, gloves and the like may also be useful.

[1052] Compositions for oral administration include powders or granules, suspensions or solutions in water, syrups, elixirs or non-aqueous media, tablets, capsules, lozenges, or troches. In the case of tablets, carriers that can be used include lactose, sodium citrate and salts of phosphoric acid. Various disintegrants such as starch, and lubricating agents such as magnesium stearate, sodium lauryl sulfate and talc, are commonly used in tablets. For oral administration in capsule form, useful diluents are lactose and high molecular weight polyethylene glycols. When aqueous suspensions are required for oral use, the nucleic acid compositions can be combined with emulsifying and suspending agents. If desired, certain sweetening and/or flavoring agents can be added.

[1053] Compositions for intrathecal or intraventricular administration may include sterile aqueous solutions which may also contain buffers, diluents and other suitable additives.

[1054] Formulations for parenteral administration may include sterile aqueous solutions which may also contain buffers, diluents and other suitable additives. Intraventricular injection may be facilitated by an intraventricular catheter, for example, attached to a reservoir. For intravenous use, the total concentration of solutes may be controlled to render the preparation isotonic.

[1055] For ocular administration, ointments or droppable liquids may be delivered by ocular delivery systems known to the art such as applicators or eye droppers. Such compositions can include mucomimetics such as hyaluronic acid, chondroitin sulfate, hydroxypropyl methylcellulose or poly(vinyl alcohol), preservatives such as sorbic acid, EDTA or benzylchronium chloride, and the usual quantities of diluents and/or carriers.

[1056] In one embodiment, the administration of the siRNA compound, e.g., a double-stranded siRNA compound, or ssiRNA compound, composition is parenteral, e.g., intravenous (e.g., as a bolus or as a diffusible infusion), intradermal, intraperitoneal, intramuscular, intrathecal, intraventricular, intracranial, subcutaneous, transmucosal, buccal, sublingual, endoscopic, rectal, oral, vaginal, topical, pulmonary, intranasal, urethral or ocular. Administration can be provided by the subject or by another person, e.g., a health care provider. The medication can be provided in measured doses or in a dispenser which delivers a metered dose. Selected modes of delivery are discussed in more detail below.

[1057] Intrathecal Administration. In one embodiment, the dsRNA agent is delivered by intrathecal injection (i.e. injection into the spinal fluid which bathes the brain and spinal chord tissue). Intrathecal injection of iRNA agents into the spinal fluid can be performed as a bolus injection or via minipumps which can be implanted beneath the skin, providing a regular and constant delivery of siRNA into the spinal fluid. The circulation of the spinal fluid from the choroid plexus, where it is produced, down around the spinal chord and dorsal root ganglia and subsequently up past the cerebellum and over the cortex to the arachnoid granulations, where the fluid can exit the CNS, that, depending upon size, stability, and solubility of the compounds injected, molecules delivered intrathecally could hit targets throughout the entire CNS.

[1058] In some embodiments, the intrathecal administration is via a pump. The pump may be a surgically implanted osmotic pump. In one embodiment, the osmotic pump is implanted into the subarachnoid space of the spinal canal to facilitate intrathecal administration.

[1059] In some embodiments, the intrathecal administration is via an intrathecal delivery system for a pharmaceutical including a reservoir containing a volume of the pharmaceutical agent, and a pump configured to deliver a portion of the pharmaceutical agent contained in the reservoir. More details about this intrathecal delivery system may be found in PCT/US2015/013253, filed on Jan. 28, 2015, which is incorporated by reference in its entirety.

[1060] The amount of intrathecally injected iRNA agents may vary from one target gene to another target gene and the appropriate amount that has to be applied may have to be determined individually for each target gene. Typically, this amount ranges between 10 g to 2 mg, preferably 50 g to 1500 g, more preferably 100 g to 1000 g.

[1061] Rectal Administration. The invention also provides methods, compositions, and kits, for rectal administration or delivery of siRNA compounds described herein.

[1062] Accordingly, an siRNA compound, e.g., a double-stranded siRNA compound, or ssiRNA compound, (e.g., a precursor, e.g., a larger siRNA compound which can be processed into a ssiRNA compound, or a DNA which encodes a an siRNA compound, e.g., a double-stranded siRNA compound, or ssiRNA compound, or precursor thereof) described herein, e.g., a therapeutically effective amount of a siRNA compound described herein, e.g., a siRNA compound having a double stranded region of less than 40, and, for example, less than 30 nucleotides and having one or two 1-3 nucleotide single strand 3′ overhangs can be administered rectally, e.g., introduced through the rectum into the lower or upper colon. This approach is particularly useful in the treatment of, inflammatory disorders, disorders characterized by unwanted cell proliferation, e.g., polyps, or colon cancer.

[1063] The medication can be delivered to a site in the colon by introducing a dispensing device, e.g., a flexible, camera-guided device similar to that used for inspection of the colon or removal of polyps, which includes means for delivery of the medication.

[1064] The rectal administration of the siRNA compound is by means of an enema. The siRNA compound of the enema can be dissolved in a saline or buffered solution. The rectal administration can also by means of a suppository, which can include other ingredients, e.g., an excipient, e.g., cocoa butter or hydropropylmethylcellulose.

[1065] Ocular Delivery. The iRNA agents described herein can be administered to an ocular tissue. For example, the medications can be applied to the surface of the eye or nearby tissue, e.g., the inside of the eyelid. They can be applied topically, e.g., by spraying, in drops, as an eyewash, or an ointment. Administration can be provided by the subject or by another person, e.g., a health care provider. The medication can be provided in measured doses or in a dispenser which delivers a metered dose. The medication can also be administered to the interior of the eye, and can be introduced by a needle or other delivery device which can introduce it to a selected area or structure. Ocular treatment is particularly desirable for treating inflammation of the eye or nearby tissue.

[1066] In certain embodiments, the double-stranded iRNA agents may be delivered directly to the eye by ocular tissue injection such as periocular, conjunctival, subtenon, intracameral, intravitreal, intraocular, anterior or posterior juxtascleral, subretinal, subconjunctival, retrobulbar, or intracanalicular injections; by direct application to the eye using a catheter or other placement device such as a retinal pellet, intraocular insert, suppository or an implant comprising a porous, non-porous, or gelatinous material; by topical ocular drops or ointments; or by a slow release device in the cul-de-sac or implanted adjacent to the sclera (transscleral) or in the sclera (intrascleral) or within the eye. Intracameral injection may be through the cornea into the anterior chamber to allow the agent to reach the trabecular meshwork. Intracanalicular injection may be into the venous collector channels draining Schlemm's canal or into Schlemm's canal.

[1067] In one embodiment, the double-stranded iRNA agents may be administered into the eye, for example the vitreous chamber of the eye, by intravitreal injection, such as with pre-filled syringes in ready-to-inject form for use by medical personnel.

[1068] For ophthalmic delivery, the double-stranded iRNA agents may be combined with ophthalmologically acceptable preservatives, co-solvents, surfactants, viscosity enhancers, penetration enhancers, buffers, sodium chloride, or water to form an aqueous, sterile ophthalmic suspension or solution. Solution formulations may be prepared by dissolving the conjugate in a physiologically acceptable isotonic aqueous buffer. Further, the solution may include an acceptable surfactant to assist in dissolving the double-stranded iRNA agents. Viscosity building agents, such as hydroxymethyl cellulose, hydroxyethyl cellulose, methylcellulose, polyvinylpyrrolidone, or the like may be added to the pharmaceutical compositions to improve the retention of the double-stranded iRNA agents.

[1069] To prepare a sterile ophthalmic ointment formulation, the double-stranded iRNA agents is combined with a preservative in an appropriate vehicle, such as mineral oil, liquid lanolin, or white petrolatum. Sterile ophthalmic gel formulations may be prepared by suspending the double-stranded iRNA agents in a hydrophilic base prepared from the combination of, for example, CARBOPOL®-940 (BF Goodrich, Charlotte, N.C.), or the like, according to methods known in the art.

[1070] Topical Delivery. Any of the siRNA compounds described herein can be administered directly to the skin. For example, the medication can be applied topically or delivered in a layer of the skin, e.g., by the use of a microneedle or a battery of microneedles which penetrate into the skin, but, for example, not into the underlying muscle tissue. Administration of the siRNA compound composition can be topical. Topical applications can, for example, deliver the composition to the dermis or epidermis of a subject. Topical administration can be in the form of transdermal patches, ointments, lotions, creams, gels, drops, suppositories, sprays, liquids or powders. A composition for topical administration can be formulated as a liposome, micelle, emulsion, or other lipophilic molecular assembly. The transdermal administration can be applied with at least one penetration enhancer, such as iontophoresis, phonophoresis, and sonophoresis.

[1071] For ease of exposition the formulations, compositions and methods in this section are discussed largely with regard to modified siRNA compounds. It may be understood, however, that these formulations, compositions and methods can be practiced with other siRNA compounds, e.g., unmodified siRNA compounds, and such practice is within the invention. In some embodiments, an siRNA compound, e.g., a double-stranded siRNA compound, or ssiRNA compound, (e.g., a precursor, e.g., a larger siRNA compound which can be processed into a ssiRNA compound, or a DNA which encodes an siRNA compound, e.g., a double-stranded siRNA compound, or ssiRNA compound, or precursor thereof) is delivered to a subject via topical administration. “Topical administration” refers to the delivery to a subject by contacting the formulation directly to a surface of the subject. The most common form of topical delivery is to the skin, but a composition disclosed herein can also be directly applied to other surfaces of the body, e.g., to the eye, a mucous membrane, to surfaces of a body cavity or to an internal surface. As mentioned above, the most common topical delivery is to the skin. The term encompasses several routes of administration including, but not limited to, topical and transdermal. These modes of administration typically include penetration of the skin's permeability barrier and efficient delivery to the target tissue or stratum. Topical administration can be used as a means to penetrate the epidermis and dermis and ultimately achieve systemic delivery of the composition. Topical administration can also be used as a means to selectively deliver oligonucleotides to the epidermis or dermis of a subject, or to specific strata thereof, or to an underlying tissue.

[1072] The term “skin,” as used herein, refers to the epidermis and/or dermis of an animal. Mammalian skin consists of two major, distinct layers. The outer layer of the skin is called the epidermis. The epidermis is comprised of the stratum corneum, the stratum granulosum, the stratum spinosum, and the stratum basale, with the stratum corneum being at the surface of the skin and the stratum basale being the deepest portion of the epidermis. The epidermis is between 50 □m and 0.2 mm thick, depending on its location on the body.

[1073] Beneath the epidermis is the dermis, which is significantly thicker than the epidermis. The dermis is primarily composed of collagen in the form of fibrous bundles. The collagenous bundles provide support for, inter alia, blood vessels, lymph capillaries, glands, nerve endings and immunologically active cells.

[1074] One of the major functions of the skin as an organ is to regulate the entry of substances into the body. The principal permeability barrier of the skin is provided by the stratum corneum, which is formed from many layers of cells in various states of differentiation. The spaces between cells in the stratum corneum is filled with different lipids arranged in lattice-like formations that provide seals to further enhance the skins permeability barrier.

[1075] The permeability barrier provided by the skin is such that it is largely impermeable to molecules having molecular weight greater than about 750 Da. For larger molecules to cross the skin's permeability barrier, mechanisms other than normal osmosis must be used.

[1076] Several factors determine the permeability of the skin to administered agents. These factors include the characteristics of the treated skin, the characteristics of the delivery agent, interactions between both the drug and delivery agent and the drug and skin, the dosage of the drug applied, the form of treatment, and the post treatment regimen. To selectively target the epidermis and dermis, it is sometimes possible to formulate a composition that comprises one or more penetration enhancers that will enable penetration of the drug to a preselected stratum.

[1077] Transdermal delivery is a valuable route for the administration of lipid soluble therapeutics. The dermis is more permeable than the epidermis and therefore absorption is much more rapid through abraded, burned or denuded skin. Inflammation and other physiologic conditions that increase blood flow to the skin also enhance transdermal adsorption. Absorption via this route may be enhanced by the use of an oily vehicle (inunction) or through the use of one or more penetration enhancers. Other effective ways to deliver a composition disclosed herein via the transdermal route include hydration of the skin and the use of controlled release topical patches. The transdermal route provides a potentially effective means to deliver a composition disclosed herein for systemic and/or local therapy.

[1078] In addition, iontophoresis (transfer of ionic solutes through biological membranes under the influence of an electric field) (Lee et al., Critical Reviews in Therapeutic Drug Carrier Systems, 1991, p. 163), phonophoresis or sonophoresis (use of ultrasound to enhance the absorption of various therapeutic agents across biological membranes, notably the skin and the cornea) (Lee et al., Critical Reviews in Therapeutic Drug Carrier Systems, 1991, p. 166), and optimization of vehicle characteristics relative to dose position and retention at the site of administration (Lee et al., Critical Reviews in Therapeutic Drug Carrier Systems, 1991, p. 168) may be useful methods for enhancing the transport of topically applied compositions across skin and mucosal sites.

[1079] The compositions and methods provided may also be used to examine the function of various proteins and genes in vitro in cultured or preserved dermal tissues and in animals. The invention can be thus applied to examine the function of any gene. The methods can also be used therapeutically or prophylactically. For example, for the treatment of animals that are known or suspected to suffer from diseases such as psoriasis, lichen planus, toxic epidermal necrolysis, erythema multiforme, basal cell carcinoma, squamous cell carcinoma, malignant melanoma, Paget's disease, Kaposi's sarcoma, pulmonary fibrosis, Lyme disease and viral, fungal and bacterial infections of the skin.

[1080] Pulmonary Delivery. Any of the siRNA compounds described herein can be administered to the pulmonary system. Pulmonary administration can be achieved by inhalation or by the introduction of a delivery device into the pulmonary system, e.g., by introducing a delivery device which can dispense the medication. Certain embodiments may use a method of pulmonary delivery by inhalation. The medication can be provided in a dispenser which delivers the medication, e.g., wet or dry, in a form sufficiently small such that it can be inhaled. The device can deliver a metered dose of medication. The subject, or another person, can administer the medication. Pulmonary delivery is effective not only for disorders which directly affect pulmonary tissue, but also for disorders which affect other tissue. siRNA compounds can be formulated as a liquid or nonliquid, e.g., a powder, crystal, or aerosol for pulmonary delivery.

[1081] For ease of exposition the formulations, compositions and methods in this section are discussed largely with regard to modified siRNA compounds. It may be understood, however, that these formulations, compositions and methods can be practiced with other siRNA compounds, e.g., unmodified siRNA compounds, and such practice is within the invention. A composition that includes an siRNA compound, e.g., a double-stranded siRNA compound, or ssiRNA compound, (e.g., a precursor, e.g., a larger siRNA compound which can be processed into a ssiRNA compound, or a DNA which encodes an siRNA compound, e.g., a double-stranded siRNA compound, or ssiRNA compound, or precursor thereof) can be administered to a subject by pulmonary delivery. Pulmonary delivery compositions can be delivered by inhalation by the patient of a dispersion so that the composition, for example, iRNA, within the dispersion can reach the lung where it can be readily absorbed through the alveolar region directly into blood circulation. Pulmonary delivery can be effective both for systemic delivery and for localized delivery to treat diseases of the lungs.

[1082] Pulmonary delivery can be achieved by different approaches, including the use of nebulized, aerosolized, micellular and dry powder-based formulations. Delivery can be achieved with liquid nebulizers, aerosol-based inhalers, and dry powder dispersion devices. Metered-dose devices are may be used. One of the benefits of using an atomizer or inhaler is that the potential for contamination is minimized because the devices are self contained. Dry powder dispersion devices, for example, deliver drugs that may be readily formulated as dry powders. A iRNA composition may be stably stored as lyophilized or spray-dried powders by itself or in combination with suitable powder carriers. The delivery of a composition for inhalation can be mediated by a dosing timing element which can include a timer, a dose counter, time measuring device, or a time indicator which when incorporated into the device enables dose tracking, compliance monitoring, and/or dose triggering to a patient during administration of the aerosol medicament.

[1083] The term “powder” means a composition that consists of finely dispersed solid particles that are free flowing and capable of being readily dispersed in an inhalation device and subsequently inhaled by a subject so that the particles reach the lungs to permit penetration into the alveoli. Thus, the powder is said to be “respirable.” For example, the average particle size is less than about 10 m in diameter with a relatively uniform spheroidal shape distribution. In some embodiments, the diameter is less than about 7.5 m and in some embodiments less than about 5.0 m. Usually the particle size distribution is between about 0.1 m and about 5 m in diameter, sometimes about 0.3 m to about 5 m.

[1084] The term “dry” means that the composition has a moisture content below about 10% by weight (% w) water, usually below about 5% w and in some cases less it than about 3% w. A dry composition can be such that the particles are readily dispersible in an inhalation device to form an aerosol.

[1085] The term “therapeutically effective amount” is the amount present in the composition that is needed to provide the desired level of drug in the subject to be treated to give the anticipated physiological response.

[1086] The term “physiologically effective amount” is that amount delivered to a subject to give the desired palliative or curative effect.

[1087] The term “pharmaceutically acceptable carrier” means that the carrier can be taken into the lungs with no significant adverse toxicological effects on the lungs.

[1088] The types of pharmaceutical excipients that are useful as carrier include stabilizers such as human serum albumin (HSA), bulking agents such as carbohydrates, amino acids and polypeptides; pH adjusters or buffers; salts such as sodium chloride; and the like. These carriers may be in a crystalline or amorphous form or may be a mixture of the two.

[1089] Bulking agents that are particularly valuable include compatible carbohydrates, polypeptides, amino acids or combinations thereof. Suitable carbohydrates include monosaccharides such as galactose, D-mannose, sorbose, and the like; disaccharides, such as lactose, trehalose, and the like; cyclodextrins, such as 2-hydroxypropyl-.beta.-cyclodextrin; and polysaccharides, such as raffinose, maltodextrins, dextrans, and the like; alditols, such as mannitol, xylitol, and the like. A group of carbohydrates may include lactose, trehalose, raffinose maltodextrins, and mannitol. Suitable polypeptides include aspartame. Amino acids include alanine and glycine, with glycine being used in some embodiments.

[1090] Additives, which are minor components of the composition of this invention, may be included for conformational stability during spray drying and for improving dispersibility of the powder. These additives include hydrophobic amino acids such as tryptophan, tyrosine, leucine, phenylalanine, and the like.

[1091] Suitable pH adjusters or buffers include organic salts prepared from organic acids and bases, such as sodium citrate, sodium ascorbate, and the like; sodium citrate may be used in some embodiments.

[1092] Pulmonary administration of a micellar iRNA formulation may be achieved through metered dose spray devices with propellants such as tetrafluoroethane, heptafluoroethane, dimethylfluoropropane, tetrafluoropropane, butane, isobutane, dimethyl ether and other non-CFC and CFC propellants.

[1093] Oral or Nasal Delivery. Any of the siRNA compounds described herein can be administered orally, e.g., in the form of tablets, capsules, gel capsules, lozenges, troches or liquid syrups. Further, the composition can be applied topically to a surface of the oral cavity.

[1094] Any of the siRNA compounds described herein can be administered nasally. Nasal administration can be achieved by introduction of a delivery device into the nose, e.g., by introducing a delivery device which can dispense the medication. Methods of nasal delivery include spray, aerosol, liquid, e.g., by drops, or by topical administration to a surface of the nasal cavity. The medication can be provided in a dispenser with delivery of the medication, e.g., wet or dry, in a form sufficiently small such that it can be inhaled. The device can deliver a metered dose of medication. The subject, or another person, can administer the medication.

[1095] Nasal delivery is effective not only for disorders which directly affect nasal tissue, but also for disorders which affect other tissue siRNA compounds can be formulated as a liquid or nonliquid, e.g., a powder, crystal, or for nasal delivery. As used herein, the term “crystalline” describes a solid having the structure or characteristics of a crystal, i.e., particles of three-dimensional structure in which the plane faces intersect at definite angles and in which there is a regular internal structure. The compositions of the invention may have different crystalline forms. Crystalline forms can be prepared by a variety of methods, including, for example, spray drying.

[1096] For ease of exposition the formulations, compositions and methods in this section are discussed largely with regard to modified siRNA compounds. It may be understood, however, that these formulations, compositions and methods can be practiced with other siRNA compounds, e.g., unmodified siRNA compounds, and such practice is within the invention. Both the oral and nasal membranes offer advantages over other routes of administration. For example, drugs administered through these membranes have a rapid onset of action, provide therapeutic plasma levels, avoid first pass effect of hepatic metabolism, and avoid exposure of the drug to the hostile gastrointestinal (GI) environment. Additional advantages include easy access to the membrane sites so that the drug can be applied, localized and removed easily.

[1097] In oral delivery, compositions can be targeted to a surface of the oral cavity, e.g., to sublingual mucosa which includes the membrane of ventral surface of the tongue and the floor of the mouth or the buccal mucosa which constitutes the lining of the cheek. The sublingual mucosa is relatively permeable thus giving rapid absorption and acceptable bioavailability of many drugs. Further, the sublingual mucosa is convenient, acceptable and easily accessible.

[1098] The ability of molecules to permeate through the oral mucosa appears to be related to molecular size, lipid solubility and peptide protein ionization. Small molecules, less than 1000 daltons appear to cross mucosa rapidly. As molecular size increases, the permeability decreases rapidly. Lipid soluble compounds are more permeable than non-lipid soluble molecules. Maximum absorption occurs when molecules are un-ionized or neutral in electrical charges. Therefore charged molecules present the biggest challenges to absorption through the oral mucosae.

[1099] A pharmaceutical composition of iRNA may also be administered to the buccal cavity of a human being by spraying into the cavity, without inhalation, from a metered dose spray dispenser, a mixed micellar pharmaceutical formulation as described above and a propellant. In one embodiment, the dispenser is first shaken prior to spraying the pharmaceutical formulation and propellant into the buccal cavity. For example, the medication can be sprayed into the buccal cavity or applied directly, e.g., in a liquid, solid, or gel form to a surface in the buccal cavity. This administration is particularly desirable for the treatment of inflammations of the buccal cavity, e.g., the gums or tongue, e.g., in one embodiment, the buccal administration is by spraying into the cavity, e.g., without inhalation, from a dispenser, e.g., a metered dose spray dispenser that dispenses the pharmaceutical composition and a propellant.

[1100] An aspect of the invention also relates to a method of delivering an oligonucleotide into the CNS by intrathecal delivery or into an ocular tissue by intravitreally.

[1101] Some embodiments relates to a method of reducing the expression of a target gene in a cell, comprising contacting said cell with an oligonucleotide having one or more lipophilic moieties conjugated to oligonucleotide, optionally via a linker or carrier. In one embodiment, the cell is a cell in the CNS system. In one embodiment, the cell is an ocular cell.

[1102] Some embodiments relates to a method of reducing the expression of a target gene in a subject, comprising administering to the subject an oligonucleotide having one or more lipophilic moieties conjugated to oligonucleotide, optionally via a linker or carrier. In one embodiment, the oligonucleotide conjugate is administered intrathecally (to reduce the expression of a target gene in a brain or spine tissue). In one embodiment, the oligonucleotide conjugate is administered intravitreally (to reduce the expression of a target gene in an ocular tissue).

[1103] In some embodiments, the oligonucleotide is double-stranded. In one embodiment, the oligonucleotide is a dsRNA agent comprising an antisense strand which is complementary to a target gene and a sense strand which is complementary to said antisense strand.

[1104] In some embodiments, the oligonucleotide is single-stranded. In one embodiment, the oligonucleotide is an antisense.

[1105] In some embodiments, the lipophilic moiety is conjugated to one or more internal positions on at least one strand of the oligonucleotide. In some embodiments, the lipophilic moiety is conjugated to one or more terminal positions on at least one strand of the oligonucleotide.

### Kits

[1106] In certain other aspects, the invention provides kits that include a suitable container containing a pharmaceutical formulation of an siRNA compound, e.g., a double-stranded siRNA compound, or ssiRNA compound, (e.g., a precursor, e.g., a larger siRNA compound which can be processed into a ssiRNA compound, or a DNA which encodes an siRNA compound, e.g., a double-stranded siRNA compound, or ssiRNA compound, or precursor thereof). In certain embodiments the individual components of the pharmaceutical formulation may be provided in one container. Alternatively, it may be desirable to provide the components of the pharmaceutical formulation separately in two or more containers, e.g., one container for an siRNA compound preparation, and at least another for a carrier compound. The kit may be packaged in a number of different configurations such as one or more containers in a single box. The different components can be combined, e.g., according to instructions provided with the kit. The components can be combined according to a method described herein, e.g., to prepare and administer a pharmaceutical composition. The kit can also include a delivery device.

[1107] The invention is further illustrated by the following examples, which should not be construed as further limiting. The contents of all references, pending patent applications and published patents, cited throughout this application are hereby expressly incorporated by reference.

### EXAMPLES

[1108] The invention now being generally described, it will be more readily understood by reference to the following examples which are included merely for purposes of illustration of certain aspects and embodiments of the present invention, and are not intended to limit the invention.

### Example 1: Threofuranosyl Nucleic Acid (TNA) Modification of siRNA Duplexes

TABLE 1
Abbreviations of nucleotide monomers used in nucleic acid sequence representation.
It will be understood that these monomers, when present in an oligonucleotide, are mutually
linked by 5′-3′-phosphodiester bonds; and it is understood that when the nucleotide contains a
2′-fluoro modification, then the fluoro replaces the hydroxy at that position in the parent
nucleotide (i.e., it is a 2′-deoxy-2′-fluoronucleotide). The abbreviations are understood to
omit the 3′-phosphate (i.e. they are 3′-OH) when placed at the 3′-terminal position of an
oligonucleotide.

| Abbreviation | Nucleotide(s) |
|---|---|
| A | Adenosine-3′-phosphate |
| Ab | beta-L-adenosine-3′-phosphate |
| Abs | beta-L-adenosine-3′-phosphorothioate |
| Af | 2′-fluoroadenosine-3′-phosphate |
| Afs | 2′-fluoroadenosine-3′-phosphorothioate |
| As | adenosine-3′-phosphorothioate |
| C | cytidine-3′-phosphate |
| Cb | beta-L-cytidine-3′-phosphate |
| Cbs | beta-L-cytidine-3′-phosphorothioate |
| Cf | 2′-fluorocytidine-3′-phosphate |
| Cfs | 2′-fluorocytidine-3′-phosphorothioate |
| Cs | cytidine-3′-phosphorothioate |
| G | guanosine-3′-phosphate |
| Gb | beta-L-guanosine-3′-phosphate |
| Gbs | beta-L-guanosine-3′-phosphorothioate |
| Gf | 2′-fluoroguanosine-3′-phosphate |
| Gfs | 2′-fluoroguanosine-3′-phosphorothioate |
| Gs | guanosine-3′-phosphorothioate |
| T | 5′-methyluridine-3′-phosphate |
| Tf | 2′-fluoro-5-methyluridine-3′-phosphate |
| Tfs | 2′-fluoro-5-methyluridine-3′-phosphorothioate |
| Ts | 5-methyluridine-3′-phosphorothioate |
| U | Uridine-3′-phosphate |
| Uf | 2′-fluorouridine-3′-phosphate |
| Ufs | 2′-fluorouridine-3′-phosphorothioate |
| Us | uridine-3′-phosphorothioate |
| N | any nucleotide, modified or unmodified |
| a | 2′-O-methyladenosine-3′-phosphate |
| as | 2′-O-methyladenosine-3′-phosphorothioate |
| C | 2′-O-methylcytidine-3′-phosphate |
| CS | 2′-O-methylcytidine-3′-phosphorothioate |
| g | 2′-O-methylguanosine-3′-phosphate |
| gs | 2′-O-methylguanosine-3′-phosphorothioate |
| t | 2′-O-methyl-5-methyluridine-3′-phosphate |
| ts | 2′-O-methyl-5-methyluridine-3′-phosphorothioate |
| u | 2′-O-methyluridine-3′-phosphate |
| us | 2′-O-methyluridine-3′-phosphorothioate |
| S | phosphorothioate linkage |
| L96 | N-[tris(GalNAc-alkyl)-amidodecanoyl)]-4-hydroxyprolinol |
| | (Hyp-(GalNAc-alkyl)3) |
| | [chemical structure] |
| | (2S,4R)-1-[29-[[2-(acetylamino)-2-deoxy-β-D-galactopyranosyl]oxy]- |
| | 14,14-bis[[3-[[3-[[5-[2-(acetylamino)-2-deoxy-β-D- |
| | galactopyranosyl]oxy]-1-oxopentyl]amino]propyl]amino]-3- |
| | oxopropoxy]methyl]-1,12,19,25-tetraoxo-16-oxa-13,20,24- |
| | triazanonacos-1-y1]-4-hydroxy-2-hydroxymethylpyrrolidine |
| aL96 | 3′-terminal L-96 modified nucleotide (L96 modified a, u, c, g, or t, |
| uL96 | respectively at a 3′-terminal. E.g., uL96: |
| cL96 | 2′-O-methyluridine-3′-phosphate ((2S,4R)-1-[29-[[2-(acetylamino)-2- |
| gL96 | deoxy-β-D-galactopyranosyl]oxy]-14,14-bis[[3-[[3-[5-[2- |
| tL96 | (acetylamino)-2-deoxy-β-D-galactopyranosyl]oxy]-1- |
| | oxopentyl]amino]propyl]amino]-3-oxopropoxy]methyl]-1,12,19,25- |
| | tetraoxo-16-oxa-13,20,24-triazanonacos-1-yl]-4-hydroxy-2- |
| | pyrrolidinyl)methyl ester |
| | [chemical structure] |
| AfaL96 | 3′-terminal L-96 modified nucleotide (L96 modified Af, CG, Gf, or Uf) |
| UfL96 | respectively at a 3′-terminal. E.g., AfL96: |
| CfL96 | 2′-deoxy-2′-fluoroadenosine-3′-phosphate ((2S,4R)-1-[29-[2- |
| GfL96 | (acetylamino)-2-deoxy-β-D-galactopyranosyl]oxy]-14,14-bis[[3-[3-[[5- |
| | [[2-(acetylamino)-2-deoxy-β-D-galactopyranosyl]oxy]-1- |
| | oxopentyl]amino]propyl]amino]-3-oxopropoxy]methyl]-1,12,19,25- |
| | tetraoxo-16-oxa-13,20,24-triazanonacos-1-yl]-4-hydroxy-2- |
| | pyrrolidinyl)methyl ester |
| Y34 | 2-hydroxymethyl-tetrahydrofurane-4-methoxy-3-phosphate (abasic 2′- |
| | OMe furanose) |
| | [chemical structure] |
| Y44 | inverted abasic DNA (2-hydroxymethyl-tetrahydrofurane-5-phosphate) |
| | [chemical structure] |
| L10 | N-(cholesterylcarboxamidocaproyl)-4-hydroxyprolinol (Hyp-C6-Chol) |
| | [chemical structure] |
| (Agn) | Adenosine-glycol nucleic acid (GNA) S-Isomer |
| (Cgn) | Cytidine-glycol nucleic acid (GNA) S-Isomer |
| (Ggn) | Guanosine-glycol nucleic acid (GNA) S-Isomer |
| (Tgn) | Thymidine-glycol nucleic acid (GNA) S-Isomer |
| P | Phosphate |
| VP | Vinyl-phosphonate (e.g., 5′-E-vinyl phosphonate) |
| dA | 2′-deoxyadenosine-3′-phosphate |
| dAs | 2′-deoxyadenosine-3′-phosphorothioate |
| dC | 2′-deoxycytidine-3′-phosphate |
| dCs | 2′-deoxycytidine-3′-phosphorothioate |
| dG | 2′-deoxyguanosine-3′-phosphate |
| dGs | 2′-deoxyguanosine-3′-phosphorothioate |
| dT | 2′-deoxythymidine-3′-phosphate |
| dTs | 2′-deoxythymidine-3′-phosphorothioate |
| dU | 2′-deoxyuridine |
| dUs | 2′-deoxyuridine-3′-phosphorothioate |
| (C2p) | cytidine-2′-phosphate |
| (G2p) | guanosine-2′-phosphate |
| (U2p) | uridine-2′-phosphate |
| (A2p) | adenosine-2′-phosphate |
| (Ahd) | 2′-O-hexadecyl-adenosine-3′-phosphate |
| (Ahds) | 2′-O-hexadecyl-adenosine-3′-phosphorothioate |
| (Chd) | 2′-O-hexadecyl-cytidine-3′-phosphate |
| (Chds) | 2′-O-hexadecyl-cytidine-3′-phosphorothioate |
| (Ghd) | 2′-O-hexadecyl-guanosine-3′-phosphate |
| (Ghds) | 2′-O-hexadecyl-guanosine-3′-phosphorothioate |
| (Uhd) | 2′-O-hexadecyl-uridine-3′-phosphate |
| (Uhds) | 2′-O-hexadecyl-uridine-3′-phosphorothioate |
| S | Phosphorothioate |

### General Oligonucleotide Synthesis and Analysis

[1109] Oligonucleotides were synthesized on a Bioautomation Mermade 12 Synthesizer using commercially available RNA amidites, 5′-O-(4,4′-dimethoxytrityl)-2′-deoxy-2′-fluoro-, and 5′-O-(4,4′-dimethoxytrityl)-2′-O-methyl-3′-O-(2-cyanoethyl-N,N-diisopropyl) phosphoramidite monomers of uridine, 4-N-acetylcytidine, 6-N-benzoyladenosine, and 2-N-isobutyrylguanosine. Standard solid-phase oligonucleotide synthesis protocols were used. The GalNAc ligand was covalently linked to the 3′ end of the sense (S) strand of the siRNA by a phosphodiester linkage between the pyrrolidine scaffold as described (see Nair et al., “Multivalent N-acetylgalactosamine-conjugated siRNA localizes in hepatocytes and elicits robust RNAi-mediated gene silencing,” J. Am. Chem. Soc. 136:16958-61 (2014); Parmar et al., “5′-(E)-Vinylphosphonate: a stable phosphate mimic can improve the RNAi activity of siRNA-GalNAc conjugates,” ChemBioChem. 17:985-89 (2016), which are incorporated herein by reference in their entirety). Phosphorothioate linkages were introduced by oxidation of phosphite utilizing 0.1 M 3-((N,N-dimethyl-aminomethylidene)amino)-3H-1,2,4-dithiazole-5-thione (DDTT) in pyridine. If phosphorothioate isomers were to be separated post-synthesis, the final dimethoxytrityl protecting group was not removed after synthesis was completed.

[1110] The deprotection procedures utilized were suitable for 2′-F and 2′-OMe modified oligonucleotides. After synthesis, the support was treated on column with 0.5 M piperidine in acetonitrile (ACN) for 15 minutes. The column was washed with ACN and treated again with 0.5 M piperadine in ACN for an additional 15 minutes, then washed again with ACN. The support was dried on-column under vacuum, and then added to a sealable container and heated at 60° C. in aqueous ammonium hydroxide (28-30%) for 2-3 hours. The deprotection procedure was completed by shaking overnight at 30° C. The oligonucleotide was then filtered to remove the support with 5x volume of water and analyzed by LC-MS and ion-exchange analysis to determine the quality of the crude as described in Nair et al. and Parmar et al. provided above.

[1111] After deprotection and crude quality confirmation, ion-exchange HPLC purification was performed. The column size for the ion-exchange HPLC purification depended on scale (total OD load). TSKgel Super Q-5PW (20) anion exchange resin from Tosoh Corporation was used for purification. Purification buffer A consisted of 20 mM sodium phosphate (pH 8.5), 15% ACN, and Buffer B was 20 mM sodium phosphate (pH 8.5), 15% ACN, 1M sodium bromide. A gradient of 15% to 45% in about 20 column volumes was sufficient, unless isomer separation post-synthesis was performed. The gradient start time was adjusted depending on the retention time of the full-length product in the ion-exchange analysis of the crude. Fractions were analyzed by the ion-exchange analysis using the Dionex DNAPac PA200 ion-exchange analytical column, 4 mm×250 mm (ThermoFisher Cat #063000) at room temperature. Buffer A was 20 mM sodium phosphate (pH 12), 15% acetonitrile, Buffer B was 20 mM sodium phosphate (pH 12), 15% acetonitrile, 1M sodium bromide. A gradient of 30% to 50% over 12 minutes at a flow rate of 1 ml/min was used to analyze the fractions.

[1112] The fractions with greater than 85% purity were pooled, dried, dissolved in water, and desalted over size exclusion columns (GE Healthcare) at a flow rate of 10 ml/min. The desalted final product was dried, resuspended in water, filtered through 0.2 μm polyethersulfone filters, and quantified analysis of absorbance at 260 nm. Samples approximately 1 OD/ml were assessed by LC-MS and ion-exchange analysis. The oligonucleotides were then frozen and lyophilized, followed by annealing of equimolar amounts of complementary strands to provide the desired siRNA duplexes by heating to 90° C. and slow cooling. The siRNA samples were analyzed by mass spectrometry and capillary gel electrophoresis and for endotoxin and osmolality as described in Nair et al. and Parmar et al. provided above.

Threofuranosyl Nucleic Acid (TNA) Synthesis and Modification of siRNA

[1113] The TNA phosphoramidite building blocks can be synthesised and incorporated into siRNA duplexes using optimized synthesis conditions as depicted in Scheme 1. See Sau et al. J. Org. Chem., 81:2302 (2016), which is incorporated herein by reference in its entirety.

[chemical structure]

[1114] Synthesis of ^{5-Me}C-TNA (Compound 2): An example for the preparation of the TNA building block ^{5-Me}C-TNA is shown by Scheme 2.

[chemical structure]

[1115] Synthesis of compound 2: To a solution of compound 1 (5.00 g, 7.89 mmol) in CH₂Cl₂ (40 ml) was added DIPEA (4.13 ml, 23.7 mmol) and 2-cyanoethyl N,N-diisopropylchlorophosphoramidite (2.11 ml, 9.47 mmol) at 0° C. The reaction mixture was allowed to room temperature and stirred for 3 h. The reaction mixture was diluted with CH₂Cl₂ (200 mL) then washed with saturated NaHCO₃ aqueous solution (100 mL). The organic layer was separated, dried over anhydrous Na₂SO₄, filtered and concentrated. The crude material was purified by flash silica gel column chromatography (0-33% EtOAc in hexanes) to give compound 2 (5.90 g, 7.07 mmol, 90%, Rf=0.36 developed with 33% EtOAc in hexanes) as a pale yellow foam. ¹H NMR (400 MHz, DMSO-d₆): δ 13.40 (s, 1H), 8.30 (d, J=7.5 Hz, 2H), 7.83-7.09 (m, 13H), 6.94-6.68 (m, 4H), 5.87-5.59 (m, 1H), 4.30-4.24 (m, 1H), 4.15-4.05 (m, 2H), 3.91-3.47 (m, 13H), 2.72-2.33 (m, 3H), 1.29-0.93 (m, 12H). ³¹P NMR (162 MHz, CD₃CN): δ 152.98, 151.73. ¹³C NMR (126 MHz, CD₃CN): δ 180.24, 161.79, 159.88, 159.85, 148.60, 145.88, 140.44, 138.41, 136.81, 136.75, 136.72, 136.55, 133.35, 130.93, 130.85, 130.81, 130.54, 129.19, 129.17, 129.13, 128.80, 128.70, 127.99, 127.97, 119.58, 119.32, 118.27, 114.58, 114.51, 114.48, 110.44, 110.34, 93.13, 93.07, 92.88, 92.86, 89.09, 89.03, 81.98, 81.84, 81.72, 78.51, 78.46, 78.17, 78.15, 76.46, 76.34, 59.64, 59.48, 59.45, 59.30, 55.95, 55.93, 44.42, 44.31, 44.24, 44.14, 24.90, 24.87, 24.83, 24.82, 24.77, 24.73, 24.68, 20.87, 20.81, 20.72, 20.66, 13.80, 13.78.

### In Vitro Silencing Activity Studies

[1116] Transfection. Primary Mouse Hepatocytes (PMH) were transfected with siRNA to test for silencing efficiency. siRNA (5 μL) at the indicated concentrations was mixed with 4.9 μL of Opti-MEM and 0.1 μL of Lipofectamine RNAiMax (Invitrogen, Cat #13778-150) per well of a 384-well plate and incubated at room temperature. After 15 minutes, 40 μL of William's E medium or EMEM medium containing approximately 5×10³ cells were added to the wells. Cells were incubated for 24 hours prior to RNA purification.

[1117] Free uptake. Free uptake experiments were carried out in PMH. siRNA (5 μL at the indicated concentration) was mixed with 5 μL of Opti-MEM per well of a 384-well plate. After 15 min, 45 μL of William's E medium or EMEM medium containing approximately 5×10³ cells were added to the wells. Cells were incubated for 48 hours prior to RNA purification.

[1118] Total RNA isolation using Dynabeads mRNA isolation kit. RNA was isolated using an automated protocol on a BioTek-EL406 platform using Dynabeads (Invitrogen, Cat #61012). 50 μL of lysis/binding buffer (Tris HCl pH 7.5, LiCl, EDTA pH 8.0, DTT) and 25 μL of lysis/binding buffer containing 3 μL of magnetic beads were added to each well. The plates were incubated on an electromagnetic shaker for 10 minutes at room temperature, then the magnetic beads were captured, and the supernatant was removed. The bead-bound RNA was washed twice with 150 μL/well of Buffer A (Tris HCl pH 7.5, LiCl, EDTA pH 8.0, DTT), and then washed once with 150 μL/well of Buffer B (Tris HCl pH 7.5, LiCl, EDTA pH 8.0). The beads were then washed with 150 μL of Elution Buffer and re-captured, and the supernatant was collected.

[1119] cDNA synthesis using ABI High-capacity cDNA reverse transcription kit. cDNA synthesis was performed using an ABI kit (Cat #4368813). To the wells of a 384-well plate containing the RNA isolated using Dynabeads was added 10 μL of a master mix containing 1 μL 10× Buffer, 0.4 μL 25×dNTPs, 1 μL 10× random primers, 0.5 μL reverse transcriptase, 0.5 μL RNase inhibitor and 6.4 μL of nuclease free water. The plates were sealed, mixed, and incubated on an electromagnetic shaker for 10 minutes at room temperature, followed by 2 hours at 37° C.

[1120] Gene expression analysis (RT-gPCR). All probes for RNA quantification were acquired from Life Technologies utilizing their Taqman gene expression system with dual labeled probes which allowed for analysis of gene expression. Target gene expression was normalized to the Gapdh ubiquitous control in each well utilizing a dual label system. Ct values were measured using a Light Cycler 480 (Roche). To calculate relative fold change, real time data were analyzed using the ΔΔCt method and normalized to assays performed with cells treated with a non-targeting siRNA control. Taqman probe catalogue numbers: Mouse C5 (Mm00439275_ml), Mouse Gapdh 4352339E, Mouse Ttr (Mm00443267_ml).

### In Vivo Studies of Silencing Activity in Mice

[1121] All procedures using mice were conducted by certified laboratory personnel using protocols consistent with local, state, and federal regulations. Experimental protocols were approved by the Institutional Animal Care and Use Committee (IACUC), the Association for Assessment and Accreditation of Laboratory Animal Care International (accreditation number: 001345), and the office of Laboratory Animal Welfare (accreditation number: A4517-01). The number of samples for animal studies was determined to be one that would allow for confidence in the resulting data set utilizing the least number of animals, as required in accordance with IACUC guidelines. All animals were acclimated in-house for 48 hours prior to study start. Female C57BL6N mice approximately 12 weeks of age were randomly assigned to each group. All animals were treated in accordance with IACUC protocols.

[1122] Animals received a single dose at 10 μL/g (1.0 mg/kg) with siRNA duplex or with PBS saline control. The siRNAs were diluted into phosphate buffered saline (PBS, pH 7.4). All dosing solutions were stored at 4° C. until time of injection. Animals were sacrificed 21 days post dose. Livers were harvested and snap frozen for analysis.

[1123] Serum collection. Blood was collected from vena facialis at day −1, day 4, day 7, day 14, respectively, pre- or post- the final dose in accordance with the IACUC approved protocol. For analysis of TTR, serum samples were kept at room temperature for 1 hour and then spun in a micro-centrifuge at 21,000×g at room temperature for 10 minutes. Serum was transferred into 1.5 mL micro-centrifuge tubes for storage at −80° C. until the time of assay.

[1124] Transthyretin (TTR) levels. At the indicated time pre- or post-dosing, animals were bled and TTR was measured in serum using a sandwich ELISA assay utilizing a HRP-conjugate antibody and 3,3′,5,5′-tetramethylbenzidine for readout at 450 nm. All samples were measured in duplicate, and each data point is the average±standard deviation.

Evaluation of TNA-Modified siRNA Duplexes

[1125] The effects of TNA incorporation on in vitro and in vivo gene silencing activities of TNA-modified siRNAs were evaluated.

[1126] As shown in Table 2, siRNAs modified with a TNA at position 1 of 5′ terminus of the antisense strand (si-66, si-67, si-68, and si-69) were compared against the corresponding control siRNAs that have no TNA modifications (si-70, si-71, si-77, and si-78). The impact of the TNA modification at position 1 of the antisense strand with or without a 5′-end phosphate was evaluated. The role of phosphorothioate linkage between the first and second nucleotides (N1 and N2) at the 5′ end of the antisense strand was also evaluated.

TABLE 2
Evaluation of TNA modified-siRNAs at position 1 of 5′ terminus of the antisense
strand with or without phosphorylation, as compared to the control siRNAs

| SiRNA ID | Strand ID | Sequences (5′-3′)^{a} | SEQ ID NO |
|---|---|---|---|
| si-66 | S22 | asasCfaGfuGfuUfCfUfuGfcUfcUfaUfaAfL96 | 39 |
| | AS24 | (Tth)UfsaUfaGfaGfcAfagaAfcAfcUfgUfususu | 40 |
| si-67 | S22 | asasCfaGfuGfuUfCfUfuGfcUfcUfaUfaAfL96 | 41 |
| | AS25 | P(Tth)UfsaUfaGfaGfcAfagaAfcAfcUfgUfususu | 42 |
| si-68 | S22 | asasCfaGfuGfuUfCfUfuGfcUfcUfaUfaAfL96 | 43 |
| | AS26 | (Tths)UfsaUfaGfaGfcAfagaAfcAfcUfgUfususu | 44 |
| si-69 | S22 | asasCfaGfuGfuUfCfUfuGfcUfcUfaUfaAfL96 | 45 |
| | AS27 | P(Tths)UfsaUfaGfaGfcAfagaAfcAfcUfgUfususu | 46 |
| si-70 (Control) | S22 | asasCfaGfuGfuUfCfUfuGfcUfcUfaUfaAfL96 | 47 |
| | AS28 | PuUfsaUfaGfaGfcAfagaAfcAfcUfgUfususu | 48 |
| si-71 (Control) | S22 | asasCfaGfuGfuUfCfUfuGfcUfcUfaUfaAfL96 | 49 |
| | AS29 | PusUfsaUfaGfaGfcAfagaAfcAfcUfgUfususu | 50 |
| si-77 (Control) | S22 | asasCfaGfuGfuUfCfUfuGfcUfcUfaUfaAfL96 | 51 |
| | ASO | usUfsaUfaGfaGfcAfagaAfcAfcUfgUfususu | 52 |
| si-78 (Control) | S22 | asasCfaGfuGfuUfCfUfuGfcUfcUfaUfaAfL96 | 53 |
| | AS35 | uUfsaUfaGfaGfcAfagaAfcAfcUfgUfususu | 54 |

^{a}P: 5′-end phosphate;
s: Phosphorothioate;
uppercase letters followed by f: 2′-F; lowercase letters: 2′-OMe;
L96: trivalent GalNAc ligand.
(Tth)
1-(alpha-L-threofuranosyl)thymine 2′-phosphate [chemical structure]
(Tths)
1-(alpha-L-threofuranosyl)thymine 2′-phosphorothioate [chemical structure]
P(Tth)
1-(alpha-L-threofuranosyl)thymine 2′,3′-bisphosphate [chemical structure]
P(Tths)
1-(alpha-L-threofuranosyl)thymine 2′-phosphorothioate-3′-phosphate

[chemical structure]

[1127] As seen in FIG. 1A (transfection conditions) and FIG. 1B (free uptake conditions), the TNA-modified siRNAs have a silencing activity comparable to the control siRNAs at the concentrations studied. When TNA was introduced in position 1 of the antisense strand, even without a 5′-end phosphate, the TNA-modified siRNAs had in vitro activity comparable to the parent unmodified siRNAs (IC₅₀ of 0.064 nM of the parent unmodified siRNA vs. 0.089 nM for the TNA-modified siRNA). Regardless of whether a phosphate group was pre-installed at the 5′ terminus of the antisense strand, the free-uptake silencing activities were comparable to that of the siRNA with a terminal 5′-phosphorylated 2′-OMe U. The potency was also independent of whether the linkage between the two nucleotides at positions 1 and 2 of the 5′ end of the antisense strand was PO or PS. The data indicate that phosphorylation of secondary hydroxyl group at the 3′ position in the threose sugar ring in the TNA, which is essential for RNAi machinery, did not affect the potency of the TNA. This suggests that the cellular kinase machinery phosphorylates the 3′ hydroxyl terminal of the TNA residue when it is placed at the 5′ end of the antisense strand.

[1128] The in vivo silencing activities of the TNA-modified siRNAs were also evaluated at a single dose of 1.0 mg/kg in mice following the silencing up to 21 days. As shown in FIG. 2, between the parent compounds si-70 (5′-P, PO linkage between N1 and N2) and si-71 (5′-P, PS linkage between N1 and N2), si-71 was more potent and durable. All four compounds with TNA (si-66 and si-68 with no 5′-terminal phosphate, PO linkage between N1 and N2; si-67 and si-69 with 5′-terminal phosphate, PS linkage between N1 and N2) were more active than the control si-70, demonstrating that the metabolic stability of siRNA duplexes with a TNA modification, compared to si-70. Although all four compounds were less active than si-71, the very fact that they were still active demonstrate the unique nature of TNA to be a substrate for kinases and the ability of 3′-terminal phosphate to be recognized by the MID domain. In particular, the activity and duration of si-69, although compromised slightly compared to si-71, allows for using TNA modification at N1 without much concern about the phosphatase activity.

Structural Analysis of TNA in siRNA Using Molecular Modeling.

[1129] The in vitro and in vivo RNAi activity data demonstrate that TNA substitution in guide siRNA is well tolerated at positions AS1. To better understand the effects on activity of TNA modification at particular sites, molecular modeling of the siRNA containing TNA in the complex with Ago2 was carried out. Models were built in the UCSF Chimera suite, using the crystal structure of the complex between Ago2 and miR-20a (PDB ID 4F3T) as reference. The TNA-U residue (minus the 5-methyl group) was taken from the crystal structure of the modified RNA octamer described above and the TNA-A residue was taken from the crystal structure of a modified A-form DNA decamer. The manually built complexes with TNA-U (AS1) were energy-minimized with Amber (ff14). FIG. 3 illustrates the outcome of the modeling studies.

[1130] The tetrose sugar adopts the C4′-exo pucker. At AS1 where the ribose in the parent complex has a DNA-like South pucker, this results in a ca. 1 Å shorter distance between the 5′-end phosphate and the first bridging phosphate (FIG. 3, the 5′-end phosphorus is highlighted as a sphere and colored in black and orange for TNA and RNA, respectively). The tetrose and ribose sugars showed little overlap, but the uracil base shifted just slightly in the TNA-modified model and maintained stacking with Y529. In addition, the tight turn between AS1 and AS2 was conserved, with only a slight shift of the AS2 phosphate, and the following residues displayed no change in conformation and interactions with Ago2.

### Example 2: Synthesis of Exemplary 4′-Me TNA Monomers

### General Conditions

[1131] TLC was performed on Merck silica gel 60 plates coated with F254. The compounds were visualized under UV light (254 nm) or after spraying with the p-anisaldehyde staining solution followed by heating. Flash column chromatography was performed using a Teledyne ISCO Combi Flash system with pre-packed RediSep Teledyne ISCO silica gel cartridges. All moisture-sensitive reactions were carried out under anhydrous conditions using dry glassware, anhydrous solvents, and argon atmosphere. All commercially available reagents and solvents were purchased from Sigma-Aldrich unless otherwise stated and were used as received. ESI-MS spectra were recorded on a Waters Qtof Premier instrument using the direct flow injection mode.

[1132] ¹H NMR spectra were recorded at 400 or 500 MHz. ¹³C NMR spectra were recorded at 101 or 126 MHz. ³¹P NMR spectra were recorded at 202 MHz. Chemical shifts are given in ppm referenced to the solvent residual peak (DMSO-d6—¹H: δ at 2.50 ppm and ¹³C δ at 39.5 ppm; CDCl₃—¹H: δ at 7.26 ppm and ¹³C δ at 77.2 ppm). Coupling constants are given in Hertz. Signal splitting patterns are described as singlet (s), doublet (d), triplet (t), or multiplet (m).

### Synthesis of Compound 1

[chemical structure]

[1133] Compound 1 was synthesized from L-arabinose as reported in Lopez-Ortega et al. Tetrahedron Asymmetry 19:976-983 (2008), which is incorporated herein by reference in its entirety.

### Synthesis of Compound 2

[chemical structure]

[1134] To a solution of compound 1 (62 g, 145 mmol) in THE (1.0 L) was added TBAF (1 M in THF, 290 mmol, 290 mL), and the mixture was stirred at room temperature overnight. The solvent was evaporated to dryness. Silica gel column chromatography (100% EtOAc) yielded Compound 2 as a white solid in 89% yield (24.5 g). ¹H NMR (500 MHz, DMSO-d6) δH: 1.19 (3H, s), 1.37 (3H, s), 3.40 (1H, m), 3.48 (1H, m), 3.75 (1H, m), 3.99 (1H, dd, J=2.3, 4.6 Hz), 4.38 (1H, d, J=4.0 Hz), 4.79 (1H, t, J=5.7 Hz), 5.37 (1H, d, J=4.6 Hz), 5.76 (1H, d, J=4.0 Hz). ¹³C NMR (101 MHz, DMSO-d6) δC: 111.09, 105.10, 88.44, 86.75, 74.50, 61.54, 26.72, 25.93. HRMS calc. for C₈H₁₄O₅Na [M+Na]⁺: 213.0733; found: 213.0729.

### Synthesis of Compound 3

[chemical structure]

[1135] To a solution of Compound 2 (24.5 g, 129 mmol) in acetonitrile (1.0 L) were added PPh₃ (194 mmol, 50.8 g), I₂(194 mmol, 49.2 g), and imidazole (387 mmol, 26.3 g), and the mixture was stirred at 60° C. for 4 hours. The reaction mixture was diluted with EtOAc, washed with 10% Na₂S₂O₃ (aq.) and brine, and dried over Na₂SO₄. The organic phase was evaporated to dryness and purified by silica gel column chromatography (hexanes/EtOAc, 7:3, v/v). Compound 3 was isolated in 94% yield as a colorless solid (36.3 g). ¹H NMR (400 MHz, DMSO-d6) δH: 1.23 (3H, s), 1.41 (3H, s), 3.32 (1H, m), 3.41 (1H, dd, J=7.7, 10.0 Hz), 4.00 (1H, t, J=7.8 Hz), 4.08 (1H, d, J=2.8 Hz), 4.47 (1H, d, J=3.8 Hz), 5.63 (1H, d, J=3.8 Hz), 5.88 (1H, d, J=3.8 Hz). ¹³C NMR (101 MHz, DMSO-d6) δC: 111.50, 105.69, 87.51, 86.31, 76.22, 26.69, 25.72, 7.75. HRMS calc. for C₈H₁₃O₄NaI [M+Na]⁺: 322.9751; found: 322.9751.

### Synthesis of Compound 4

[chemical structure]

[1136] To a solution of compound 3 (200 mg, 0.7 mmol) in DMF (10 mL) were added TBDPSCl (0.34 mL, 1.3 mmol) and imidazole (140 mg, 2.0 mmol), and the mixture was stirred at room temperature overnight. The reaction mixture was diluted with EtOAc, washed with saturated NaHCO₃ (aq.) and brine, and dried over with Na₂SO₄. The organic phase was evaporated to dryness and purified by silica gel column chromatography (hexanes/EtOAc, 9:1, v/v). Compound 4 was isolated in 50% yield as a colorless oil (180 mg). ¹H NMR (500 MHz, DMSO-d6) δH: 1.02 (9H, s), 1.17 (3H, s), 1.33 (1H, s), 3.00 (1H, dd, J=7.4, 10.1 Hz), 3.11 (1H, dd, J=7.4, 10.1 Hz), 4.03 (1H, t, J=7.1 Hz), 4.23 (1H, s), 4.56 (1H, d, J=3.6 Hz), 5.99 (1H, d, J=3.7 Hz), 7.44-7.51 (6H, m), 7.61 (4H, m). ¹³C NMR (126 MHz, DMSO-d6) δC: 135.32, 135.29, 132.22, 132.18, 130.23, 130.22, 128.05, 128.01, 111.73, 105.63, 87.62, 86.03, 78.36, 26.67, 26.44, 25.62, 18.66, 6.38. HRMS calc. for C₂₄H₃₁IO₄SiNa [M+Na]⁺: 561.0928; found: 561.0934.

### Synthesis of Compound 5

[chemical structure]

[1137] To a solution of compound 4 (41 g, 76.1 mmol) in toluene (1.0 L) were added AIBN (2.5 g, 15.2 mmol) and (Me₃Si)₃SiH (35.2 mL, 114 mmol). The mixture was stirred at 90° C. for 1 hour. The solvent was evaporated to dryness and purified by silica gel column chromatography (hexanes/EtOAc, 9:1, v/v). The obtained Compound 5 (29.0 g) was used in synthesis of Compound 6 without further purification.

### Synthesis of Compound 6

[chemical structure]

[1138] To a solution of crude compound 5 (29.0 g) in DCM (700 mL) was added 80% TFA (aqueous) (210 mL), and the mixture was stirred at room temperature overnight. The reaction was quenched by addition of NaHCO₃. The reaction mixture was washed with saturated NaHCO₃ (aqueous) and brine. The organic phase was evaporated to dryness and purified by silica gel column chromatography (hexanes/EtOAc, 7:3, v/v). Compound 6 was isolated in 47% yield over two steps as a colorless solid (20 g). ¹H NMR (400 MHz, DMSO-d6) δH: 0.76 (6H, d, J=6.3 Hz), 1.01 (18H, s), 3.58 (1H, dd, J=3.9, 6.5 Hz), 3.65 (1H, m), 3.80 (1H, t, J=5.1 Hz), 3.86 (1H, m), 3.91 (1H, m), 3.96 (1H, t, J=6.3 Hz), 4.74 (1H, d, J=6.4 Hz), 4.89 (1H, d, J=1.9, 4.9 Hz), 5.04 (1H, dd, J=4.3, 6.7 Hz), 5.19 (1H, d, J=5.3 Hz), 6.10 (1H, d, J=4.8 Hz), 6.14 (1H, d, J=6.7 Hz), 7.40-7.46 (12H, m), 7.59-7.66 (8H, m). ¹³C NMR (101 MHz, DMSO-d6) δC: 135.44, 135.32, 133.42, 133.04, 132.97, 129.84, 129.80, 129.78, 127.73, 127.67, 127.65, 102.01, 95.87, 84.68, 83.69, 82.68, 77.75, 77.56, 77.49, 26.74, 20.06, 18.85, 18.81, 18.23. HRMS calc. for C₂₁H₂₉O₄SiNa [M+Na]⁺: 395.1649; found: 395.1649.

### Synthesis of Compound 7

[chemical structure]

[1139] To a solution of Compound 6 (20 g, 53.7 mmol) in pyridine (500 mL) were added benzoic anhydride (26.7 g, 118 mmol) and DMAP (1.3 g, 10.7 mmol), and the mixture was stirred at room temperature overnight. The solvent was evaporated to dryness. The resulting mixture was dissolved in EtOAc, washed with saturated NaHCO₃ (aqueous) and brine, and dried over Na₂SO₄. The organic phase was evaporated to dryness and co-evaporated with toluene several times. The obtained compound 7 (35.0 g) was used for synthesis of Compound 8 without further purification.

### Synthesis of Compound 8

[chemical structure]

[1140] To a solution of crude compound 7 (10 g, 15.3 mmol) in acetonitrile (30 mL) were added thymine (2.0 g, 16.1 mmol) and BSA (15 mL, 61.4 mmol), and the mixture was stirred at 60° C. for 30 minutes. TMSOTf (4.4 mL, 24.5 mmol) was added, and the mixture was stirred at 60° C. for another 2 hours. The reaction mixture was diluted with EtOAc, washed with saturated NaHCO₃ (aqueous) and brine, and dried over Na₂SO₄. The organic phase was evaporated to dryness, and Compound 8 was purified by silica gel column chromatography (hexanes/EtOAc, 4:6, v/v). Compound 8 was obtained with a small amount of an impurity, possibly the a isomer as a white foam (7.2 g).

### Synthesis of Compound 9

[chemical structure]

[1141] To a solution of Compound 8 (7.2 g, 12.3 mmol) in THE (100 mL) was added TBAF (1 M in THF, 14.8 mL, 14.8 mmol), and the mixture was stirred at 0° C. for 2 hours. The reaction mixture was diluted with EtOAc, washed with brine, and dried over Na₂SO₄. The organic phase was evaporated to dryness and purified by silica gel column chromatography (hexanes/EtOAc, 3:7, v/v, then 100% EtOAc). Compound 9 was obtained with a small amount of an impurity as a white foam (4.3 g).

### Synthesis of Compound 10

[chemical structure]

[1142] To a solution of Compound 9 (4.4 g, 12.3 mol) in THF/pyridine (4:1, v/v; 120 mL) were added DMTrCl (7.5 g, 22.1 mmol) and AgNO₃ (3.7 g, 22.1 mmol), and the mixture was stirred at room temperature overnight. The reaction mixture was filtered through a celite pad, diluted with EtOAc, washed with saturated NaHCO₃ (aqeuous) and brine, and dried over Na₂SO₄. The organic phase was evaporated to dryness and purified by silica gel column chromatography (hexanes/EtOAc, 1:1, v/v). Compound 10 was obtained with a small amount of an impurity as a yellow foam (8.4 g).

### Synthesis of Compound 11

[chemical structure]

[1143] To a solution of Compound 10 in THF-MeOH (120 mL, THF/MeOH, 1:1, v/v) was added NaOH (1 M in water, 16 mL, 16.0 mmol), and the mixture was stirred at room temperature for 3 hours. The reaction mixture was diluted with EtOAc, washed with saturated NaHCO₃ (aqeuous) and brine, and dried over Na₂SO₄. The organic phase was evaporated to dryness and purified by silica gel column chromatography (hexanes/EtOAc, 2:8, v/v). Compound 11 was isolated in 71% yield over five steps as a white foam (6.3 g). ¹H NMR (400 MHz, DMSO-d6) δH: 0.91 (3H, d, J=6.7 Hz), 1.69 (3H, s), 2.04 (1H, s), 3.66 (1H, d, J=3.3 Hz), 3.69 (6H, s), 4.05 (1H, m), 5.55 (1H, d, J=3.5 Hz), 5.56 (1H, s), 6.81-6.84 (4H, m), 7.15-7.19 (5H, m), 7.21-7.28 (4H, m), 7.42 (1H, s), 11.25 (1H, s). ¹³C NMR (126 MHz, DMSO-d6) δC: 206.43, 163.99, 158.21, 158.19, 150.15, 145.03, 136.57, 135.68, 135.65, 129.73, 129.66, 127.91, 127.53, 126.76, 113.37, 107.85, 92.70, 87.23, 84.91, 82.39, 79.69, 79.15, 55.06, 54.88, 30.66, 19.62, 12.35. HRMS calc. for C₃₁H₃₂N₂O₇Na [M+Na]⁺: 567.2102; found: 567.2094.

### Synthesis of Compound 12

[chemical structure]

[1144] To a solution of Compound 11 (2.2 g, 4.0 mmol) in DCM (40 mL) were added i-Pr₂NP(Cl)O(CH₂)₂CN (2.7 mL, 12.0 mmol), DIPEA (3.5 mL, 20.0 mmol), and N-methylimidazole (1.1 mL, 14.0 mmol), and the mixture was stirred at room temperature overnight. The reaction mixture was diluted with DCM, washed with saturated NaHCO₃ (aqeuous), and brine and dried over Na₂SO₄. The organic phase was evaporated to dryness and purified by silica gel column chromatography (hexanes/EtOAc, 1:1, v/v). Compound 12 was isolated in 81% yield (2.4 g). ¹H NMR (400 MHz, CDCl₃) δH: 0.94 (0.6H, d, J=6.8 Hz), 0.99 (3H, d, J=6.8 Hz), 1.06 (6H, d, J=6.8 Hz), 1.14-1.21 (8.7H, m), 1.25 (0.6H, s), 1.83 (3H, d, J=1.2 Hz), 1.85 (0.6H, d, J=1.2 Hz), 2.18-2.35 (0.5H, m), 2.61-2.74 (2.3H, m), 3.52-3.62 (3H, m), 3.75-3.96 (12H, m), 4.04 (0.2H, s), 4.41 (1H, d, J=8.5 Hz), 4.66 (0.2H, d, J=9.0 Hz), 5.93 (0.2H, d, J=1.5 Hz), 5.99 (1H, s,), 6.80-6.85 (5H, m), 7.18-7.37 (13H, m), 7.42 (1H, m), 8.45 (1H, s). ¹³C NMR (101 MHz, CDCl₃) δC: 164.10, 159.01, 158.99, 150.33, 144.87, 137.27, 137.07, 136.17, 135.98, 135.86, 130.33, 130.13, 130.10, 130.06, 128.36, 128.33, 128.16, 128.00, 127.35, 118.20, 113.82, 113.76, 113.68, 109.58, 92.49, 88.62, 86.44, 85.98, 84.07, 83.88, 82.78, 82.72, 58.67, 58.46, 55.54, 55.50, 55.48, 43.72, 43.65, 43.59, 43.53, 29.92, 24.75, 24.71, 24.68, 24.63, 20.39, 20.31, 19.62, 12.89, 0.21. ³¹P NMR (202 MHz, CDCl₃) δP: 152.98, 151.92. HRMS calc. for C₄₀H₅₀N₄P₈P [M+H]⁺: 745.3366; found: 745.3375.

### Synthesis of Compound 14

[chemical structure]

[1145] To a solution of Compound 11 (3.2 g, 5.9 mmol) in DCM (60 mL) at 0° C. were added TMSCl (2.2 mL, 17.7 mmol) and NEt₃ (2.9 mL, 20.7 mmol), and the mixture was stirred room temperature for 4 hours. The solvent was evaporated to dryness. To a solution of the resulting mixture in acetonitrile (60 mL) were added NEt₃ (18.8 mL, 136 mmol), and 1,2,4-triazole (9.4 g, 136 mmol). To this reaction mixture at 0° C. was added POCl₃ (1.4 mL, 14.8 mmol). The mixture was stirred at 0° C. for 4 hours. The reaction mixture was diluted with EtOAc, washed with saturated NaHCO₃ (aqeuous) and brine, and dried over Na₂SO₄. The organic phase was evaporated to dryness. Crude Compound 14 was used for next reaction without further purification.

### Synthesis of Compound 15

[chemical structure]

[1146] To a solution of crude Compound 14 in 1,4-dioxane (60 mL) was added 28% NH₄OH (aqueous) (120 mL), and the mixture was stirred at room temperature for 4 days. The reaction mixture was diluted with EtOAc, washed with brine, and dried over Na₂SO₄. The organic phase was evaporated to dryness and purified by silica gel column chromatography (DCM/MeOH, 95:5, v/v). To a solution of resulting mixture in DMF (30 mL) was added benzoic anhydride (1.1 g, 5.0 mmol), and the mixture was stirred at room temperature overnight. The reaction mixture was diluted with EtOAc, washed with saturated NaHCO₃ (aqueous) and brine, and dried over Na₂SO₄. The organic phase was evaporated to dryness and purified by silica gel column chromatography (hexanes/EtOAc, 7:3, v/v). Compound 15 was isolated in 50% yield over four steps (1.8 g). ¹H NMR (400 MHz, DMSO-d6) δH: 0.96 (3H, d, J=6.5 Hz), 1.98 (3H, s), 3.70 (6H, s), 3.74 (1H, s), 3.85 (1H, s), 4.14 (1H, s), 5.65 (1H, s), 6.85 (4H, m), 7.15-7.26 (9H, m), 7.50 (2H, m), 7.59 (1H, m), 7.77 (1H, s), 8.21 (1H, s), 13.16 (1H, s). ¹³C NMR (101 MHz, DMSO-d6) δC: 178.05, 159.55, 158.19, 158.16, 147.07, 144.81, 139.64, 136.87, 135.67, 135.62, 132.41, 129.63, 129.58, 129.29, 128.27, 127.94, 127.55, 126.79, 113.38, 113.35, 108.58, 93.70, 87.30, 85.62, 82.08, 79.38, 55.00, 19.72, 13.10. HRMS calc. for C₃₈H₃₈N₃O₇ [M+H]⁺: 648.2710; found: 648.2701.

### Synthesis of Compound 16

[chemical structure]

[1147] To a solution of Compound 15 (1.3 g, 2.0 mmol) in DCM (20 mL) were added i-Pr₂NP(Cl)O(CH₂)₂CN (1.4 mL, 6.0 mmol), DIPEA (1.7 mL, 10 mmol), and N-methylimidazole (0.6 mL, 7 mmol), and the mixture was stirred at room temperature for 3 hours. The reaction mixture was diluted with DCM, washed with saturated aqueous NaHCO₃ and brine, and dried over Na₂SO₄. The organic phase was evaporated to dryness and purified by silica gel column chromatography (hexanes/EtOAc, 7:3, v/v). Compound 16 was isolated in 76% yield (1.3 g). ¹H NMR (500 MHz, CDCl₃) δH: 0.98 (0.7H, d, J=6.8 Hz), 1.03 (3.7H, d, J=6.7 Hz), 1.08 (7H, d, J=6.8 Hz), 1.17 (8.7H, m), 1.22 (1.2H, d, J=6.8 Hz), 2.03 (4.2H, s), 2.21-2.39 (0.3H, m), 2.65-2.79 (2.3H, m), 3.55-3.62 (3.1H, m), 3.73 (9.6H, m), 3.84 (1.2H, m), 3.91 (1.1H, s), 3.94-4.00 (1.2H, m), 4.05 (0.2H, s), 4.49 (1H, d, J=8.6 Hz), 4.72 (0.2H, d, J=9.0 Hz), 5.98 (0.2H, d, J=1.6 Hz), 6.03 (1H, s), 6.79-6.84 (5.4H, m), 7.18-7.32 (12.8H, m), 7.45 (2.7H, m), 7.51-7.57 (2.7H, m), 8.37 (2.5H, m), 13.48 (1H, s). ¹³C NMR (101 MHz, CDCl3) δC: 179.65, 160.45, 160.43, 158.99, 158.94, 158.91, 148.00, 144.71, 144.63, 138.61, 138.35, 137.60, 136.15, 135.94, 135.83, 135.79, 132.42, 130.24, 130.04, 129.98, 129.92, 128.40, 128.34, 128.31, 128.22, 128.17, 128.10, 128.01, 127.31, 118.22, 117.71, 113.75, 113.71, 113.62, 110.49, 110.34, 93.28, 93.20, 93.02, 93.00, 88.60, 88.56, 86.71, 86.23, 83.85, 83.74, 83.69, 83.55, 82.58, 82.52, 81.62, 58.67, 58.46, 58.30, 58.09, 55.43, 55.40, 55.37, 43.67, 43.62, 43.54, 43.50, 24.76, 24.71, 24.67, 24.65, 24.58, 20.34, 20.26, 20.07, 19.99, 19.67, 19.65, 13.98, 13.91. ³¹P NMR (202 MHz, CDCl₃) δP: 152.98, 151.71. HRMS calc. for C₄₇H₅₅N₅O₈P [M+H]⁺: 848.3788; found: 348.3787.

### Synthesis of Compound 18

[chemical structure]

[1148] To a solution of crude Compound 7 (9.0 g, 13.7 mmol) in toluene (30 mL) were added N-6-benzoyladenine (3.3 g, 13.7 mmol) and BSA (13.4 mL, 55 mmol), and the mixture was stirred at 95° C. for 30 minutes. To the reaction mixture was added TMSOTf (4.0 mL, 22 mmol), and the mixture was stirred at 95° C. for another 2 hours. The reaction mixture was diluted with EtOAc, washed with saturated aqueous NaHCO₃ and brine, and dried over Na₂SO₄. The organic phase was evaporated to dryness and purified by silica gel column chromatography (hexanes/EtOAc, 1:1, v/v). Compound 18 was obtained with a small amount of an impurity, possibly the a isomer or the N-7 isomer (5.8 g).

### Synthesis of Compound 19

[chemical structure]

[1149] To a solution of crude Compound 18 (5.8 g) in THE (80 mL) was added TBAF (1 M in THF, 10 mL, 10 mmol), and the mixture was stirred at 0° C. for 2 hours. The reaction mixture was diluted with EtOAc, washed with brine, and dried over Na₂SO₄. The organic phase was evaporated to dryness and purified by silica gel column chromatography (hexanes/EtOAc, 3:7, v/v, then 100% EtOAc). The obtained crude Compound 19 was recrystallized from EtOAc. Compound 19 was isolated in 36% yield over three steps (2.3 g). ¹H NMR (400 MHz, DMSO-d6) δH: 1.36 (3H, d, J=6.2 Hz), 4.21 (1H, m), 4.62 (1H, m), 6.08 (1H, d, J=4.9 Hz), 6.11 (1H, dd, J=4.2, 5.8 Hz), 6.37 (1H, d, J=4.2 Hz), 7.53-7.57 (4H, m), 7.63-7.71 (2H, m), 7.98-8.00 (2H, m), 8.04-8.06 (2H, m), 8.65 (1H, s), 8.78 (1H, s), 11.22 (1H, s). ¹³C NMR (126 MHz, DMSO-d6) δC: 165.55, 165.21, 151.83, 151.68, 150.43, 143.75, 133.84, 133.30, 132.43, 129.46, 128.81, 128.69, 128.45, 125.89, 86.36, 81.77, 80.13, 78.56, 18.18. HRMS calc. for C₂₄H₂₁N₅O₅Na [M+Na]⁺: 482.1435; found: 482.1435.

### Synthesis of Compound 20

[chemical structure]

[1150] To a solution of Compound 19 (530 mg, 1.2 mmol) in THF-pyridine (4:1, v/v; 12 mL) were added DMTrCl (710 mg, 2.1 mmol) and AgNO₃ (350 mg, 2.1 mmol), and the mixture was stirred at room temperature overnight. The reaction mixture was filtered through a Celite pad, diluted with EtOAc, washed with saturated aqueous NaHCO₃ and brine, and dried over Na₂SO₄. The organic phase was evaporated to dryness and purified by silica gel column chromatography (hexanes/EtOAc, 1:1, v/v). Compound 20 was isolated in 98% yield (830 mg). ¹H NMR (400 MHz, DMSO-d6) δH: 1.15 (3H, d, J=6.5 Hz), 3.58 (3H, s), 3.62 (3H, s), 4.18 (1H, dd, J=1.7, 3.6 Hz), 4.68 (1H, m), 5.41 (1H, s), 6.30 (1H, d, J=1.5 Hz), 6.76-6.83 (4H, m), 7.16-7.22 (5H, m), 7.25-7.29 (2H, m), 7.32-7.34 (2H, m), 7.51-7.59 (4H, m), 7.64-7.70 (2H, m), 7.83-7.85 (2H, m), 8.07 (2H, m), 8.61 (1H, s), 8.79 (1H, s), 11.27 (1H, s). ¹³C NMR (126 MHz, DMSO-d6) δC: 165.59, 164.25, 158.37, 158.29, 151.82, 151.76, 150.48, 144.65, 142.31, 135.27, 134.91, 133.73, 133.32, 132.45, 129.91, 129.69, 129.39, 128.72, 128.48, 128.45, 128.43, 127.97, 127.51, 126.92, 125.50, 113.38, 113.32, 87.80, 87.47, 82.37, 81.29, 54.90, 54.84, 18.74. HRMS calc. for C₄₅H₃₉N₅O₇Na [M+Na]⁻: 784.2742; found: 784.2729.

### Synthesis of Compound 21

[chemical structure]

[1151] To a solution of Compound 20 (4.0 g, 5.2 mmol) in THF-MeOH (1:1. v/v; 50 mL) was added NaOH (1 M in water, 6.8 mL, 6.8 mmol), and the mixture was stirred at 0° C. for 3 hours. The reaction mixture was diluted with EtOAc, washed with brine, and dried over Na₂SO₄. The organic phase was evaporated to dryness and purified by silica gel column chromatography (hexanes/EtOAc, 2:8, v/v, then 100% EtOAc). Compound 21 was isolated in 70% yield (2.4 g). ¹H NMR (400 MHz, DMSO-d6) δH: 0.99 (3H, d, J=6.6 Hz), 3.71 (6H, m), 3.79 (1H, s), 4.27 (1H, m), 4.34 (1H, d, J=3.5 Hz), 5.73 (1H, d, J=3.5 Hz), 6.06 (1H, s), 6.80-6.83 (4H, m), 6.96-6.99 (4H, m), 7.09-7.11 (2H, m), 7.17-7.20 (1H, m), 7.23-7.27 (2H, m), 7.54-7.57 (2H, m), 7.63-7.67 (1H, m), 8.06 (2H, m), 8.50 (1H, s), 8.72 (1H, s), 11.21 (1H, s). ¹³C NMR (126 MHz, DMSO-d6) δC: 165.57, 158.12, 151.51, 151.27, 150.14, 144.62, 142.11, 135.66, 133.47, 132.37, 129.60, 128.43, 127.88, 127.70, 126.78, 125.91, 113.25, 113.23, 91.55, 86.96, 84.54, 83.00, 79.03, 54.99, 19.60. HRMS calc. for C₃₉H₃₅N₅O₆Na [M+Na]⁺: 680.2480; found: 680.2478.

### Synthesis of Compound 22

[chemical structure]

[1152] To a solution of Compound 21 (1.9 g, 2.9 mmol) in DCM (30 mL) were added i-Pr₂NP(Cl)O(CH₂)₂CN (1.9 mL, 8.7 mmol), DIPEA (2.5 mL, 14.5 mmol), and N-methylimidazole (0.81 mL, 10.2 mmol), and the mixture was stirred at room temperature for 2 hours. The reaction mixture was diluted with DCM, washed with saturated aqueous NaHCO₃ and brine, and dried over Na₂SO₄. The organic phase was evaporated to dryness and purified by silica gel column chromatography (hexanes/EtOAc, 1:1, v/v). Compound 22 was isolated in 84% yield (2.1 g). ¹H NMR (500 MHz, CDCl₃) δH: 1.05 (1.5H, d, J=6.7 Hz), 1.13 (6H, d, J=6.7 Hz), 1.17-1.30 (20H, m), 2.29-2.35 (0.5H, m), 2.40-2.45 (0.5H, m), 2.54-2.60 (1H, m), 2.64-2.70 (1H, m), 3.57-3.68 (4.5H, m), 3.71-3.75 (11H, m), 3.91-3.95 (2.5H, m), 4.02-4.06 (1H, m), 4.38 (1H, q, J=6.6 Hz), 4.48 (1H, d, J=8.0 Hz), 5.01 (0.5H, d, J=9.3 Hz), 6.31 (0.5H, d, J=1.5 Hz), 6.35 (1H, s), 6.74-6.78 (6H, m), 6.99-7.05 (6.5H, m), 7.10-7.12 (3H, m), 7.14-7.23 (5H, m), 7.26 (1H, s), 7.52-7.56 (3H, m), 7.60-7.63 (1.5H, m), 8.05 (3H, d, J=7.4 Hz), 8.34 (0.5H, s), 8.40 (1H, s), 8.77 (1H, s), 8.81 (0.5H, s), 9.17 (1.5H, m). ¹³C NMR (101 MHz, CDCl₃) δC: 164.74, 158.94, 158.89, 158.86, 152.62, 152.39, 151.32, 149.53, 149.47, 144.67, 144.64, 142.05, 141.82, 136.08, 135.96, 135.85, 135.81, 134.13, 132.91, 130.24, 130.04, 129.92, 129.08, 128.24, 128.22, 128.03, 127.29, 127.24, 123.51, 117.72, 113.69, 113.66, 113.59, 113.57, 91.70, 91.44, 91.37, 88.37, 88.24, 86.15, 85.91, 83.36, 83.29, 82.61, 82.03, 81.90, 58.66, 58.58, 58.47, 58.35, 55.45, 55.43, 55.40, 55.38, 43.73, 43.63, 43.60, 43.51, 24.88, 24.81, 24.72, 24.62, 20.37, 20.29, 20.21, 20.13, 19.91, 19.70. ³¹P NMR (202 MHz, CDCl₃) δP: 152.80, 151.47. HRMS calc. for C₄₇H₅₃N₇O₇P [M+H]⁺: 858.3744; found: 858.3730.

### Synthesis of Compound 24

[chemical structure]

[1153] To a solution of crude Compound 7 (9.7 g, 16.3 mmol) in toluene (30 mL) were added N-2-iBu-O-6-diphenylcarbamoyl guanosine (6.8 g, 16.3 mmol) and BSA (16 mL, 65.2 mmol), and the mixture was stirred at 95° C. for 30 minutes. To the reaction mixture was added TMSOTf (4.7 mL, 26.1 mmol), and the mixture was stirred at 95° C. for another 2 hours. The reaction mixture was diluted with EtOAc, washed with saturated aqueous NaHCO₃ and brine, and dried over Na₂SO₄. The organic phase was evaporated to dryness and purified by silica gel column chromatography (hexanes/EtOAc, 3:1, v/v). Compound 24 was isolated in 42% yield over two steps (4.9 g). ¹H NMR (400 MHz, DMSO-d6) δH: 0.92 (9H, s), 1.06 (3H, d, J=6.8 Hz), 1.09 (6H, d, J=6.6 Hz), 2.82 (1H, m), 4.19 (1H, dd, J=6.5, 7.9 Hz), 5.23 (1H, m), 6.14 (1H, d, J=4.4 Hz), 6.23 (1H, dd, J=4.4, 6.5 Hz), 7.22-7.26 (2H, m), 7.29-7.35 (3H, m), 7.42-7.51 (13H, m), 7.54-7.56 (2H, m), 7.61-7.65 (3H, m), 7.70-7.72 (2H, m), 8.48 (1H, s), 10.74 (1H, s). ¹³C NMR (101 MHz, DMSO-d6) δC: 174.55, 164.91, 155.15, 154.08, 152.20, 150.09, 144.88, 141.53, 135.51, 135.27, 133.69, 132.44, 131.97, 130.11, 129.96, 129.40, 129.23, 128.52, 128.21, 127.83, 127.61, 120.79, 86.39, 81.09, 80.31, 78.97, 34.53, 26.37, 19.29, 19.02, 18.67, 17.98. HRMS calc. for C₅₀H₅₀N₆O₇SiNa [M+Na]⁺: 897.3402; found: 897.3397.

### Synthesis of Compound 25

[chemical structure]

[1154] To a 20% TFA solution in DCM (70 mL) was added Compound 24 (6.0 g, 6.9 mmol), and the mixture was stirred at 0° C. for 1 hour. The reaction was quenched by adding NaHCO₃. The reaction mixture was diluted with EtOAc, washed with saturated NaHCO₃ (aq.) and brine, and dried over Na₂SO₄. The organic phase was evaporated to dryness and purified by silica gel column chromatography (hexanes/EtOAc, 4:6, v/v). Compound 25 was isolated in 81% yield (3.8 g). ¹H NMR (400 MHz, DMSO-d6) δH: 0.96 (9H, s), 1.05 (3H, d, J=6.3 Hz), 1.07 (3H, d, J=2.8 Hz), 1.09 (3H, d, J=2.8 Hz), 2.73 (1H, m), 4.22 (1H, dd, J=4.1, 5.3 Hz), 4.61 (1H, m), 5.92 (1H, t, J=3.7 Hz), 6.08 (1H, d, J=3.3 Hz), 7.27-7.40 (2H, m), 7.33-7.37 (1H, m), 7.42-7.54 (7H, m), 7.60-7.68 (3H, m), 7.74 (2H, m), 8.31 (1H, s), 11.47 (1H, s), 12.11 (1H, s). ¹³C NMR (101 MHz, DMSO-d6) δC: 179.97, 164.46, 154.78, 148.22, 148.03, 137.76, 135.44, 135.21, 133.89, 131.94, 131.84, 130.28, 130.05, 129.29, 128.72, 128.15, 127.97, 127.73, 120.35, 85.97, 81.93, 81.25, 80.28, 34.65, 26.50, 18.84, 18.75, 18.61, 18.25. HRMS calc. for C₃₇H₄₂N₅O₆Si [M+H]⁺: 680.2904; found: 680.2906.

### Synthesis of Compound 26

[chemical structure]

[1155] To a solution of Compound 25 (100 mg, 0.15 mmol) in THE (2 mL) was added TBAF (1 M in THF, 1.2 eq., 0.18 mL, 0.18 mmol), and the mixture was stirred at 0° C. for 2 hours. The reaction mixture was diluted with EtOAc, washed with brine, and dried over Na₂SO₄. The organic phase was evaporated to dryness and purified by silica gel column chromatography (hexanes/EtOAc, 2:8, v/v, then EtOAc/MeOH, 95:5, v/v). Compound 26 was isolated in 98% yield (80 mg). ¹H NMR (400 MHz, DMSO-d6) δH: 1.10 (6H, m), 1.33 (3H, d, J=6.3 Hz), 2.74 (1H, m), 4.16 (1H, m), 4.50 (1H, m), 5.81 (1H, m), 6.01 (1H, d, J=4.8 Hz), 6.10 (1H, d, J=3.7 Hz), 7.56 (2H, t, J=7.2 Hz), 7.70 (1H, t, J=7.4 Hz), 7.98 (2H, d, J=7.2 Hz), 8.23 (1H, s), 11.53 (1H, s), 12.12 (1H, s). ¹³C NMR (101 MHz, DMSO-d6) δC: 180.11, 165.01, 154.78, 148.29, 148.08, 138.39, 133.93, 129.43, 128.89, 128.60, 120.31, 85.78, 82.28, 80.47, 78.46, 34.70, 18.85, 18.82, 18.38. HRMS calc. for C₂₁H₂₄N₅O₆ [M+H]⁺: 442.1727; found: 442.1727.

### Synthesis of Compound 27

[chemical structure]

[1156] To a solution of Compound 26 (2.3 g, 5.2 mmol) in THF-pyridine (4:1, v/v; 50 mL) were added DMTrCl (5.3 g, 15.6 mmol) and AgNO₃ (2.6 g, 15.6 mmol), and the mixture was stirred at 50° C. overnight. The reaction mixture was filtered through a Celite pad, diluted with EtOAc, washed with saturated aqueous NaHCO₃ and brine, and dried over Na₂SO₄. The organic phase was evaporated to dryness and purified by silica gel column chromatography (hexanes/EtOAc, 3:7, v/v). Compound 27 was isolated in 62% yield (2.4 g). ¹H NMR (400 MHz, DMSO-d6) δH: 1.07 (6H, d, J=6.8 Hz), 1.20 (3H, d, J=6.5 Hz), 2.71 (1H, m), 3.59 (3H, s), 3.62 (3H, s), 4.22 (1H, d, J=2.9 Hz), 4.67 (1H, m), 4.71 (1H, m), 5.95 (1H, s), 6.78-6.84 (4H, m), 7.21 (1H, t, J=7.23 Hz), 7.28-7.33 (6H, m), 7.44 (1H, d, J=7.6 Hz), 7.53 (2H, t, J=7.7 Hz), 7.69 (1H, t, J=7.4 Hz), 7.86 (2H, d, J=7.3 Hz), 8.20 (1H, s), 11.54 (1H, s), 12.11 (1H, s). ¹³C NMR (101 MHz, DMSO-d6) δC: 180.08, 164.33, 158.47, 158.40, 154.77, 148.36, 148.33, 144.75, 136.98, 135.24, 134.72, 133.96, 130.00, 129.75, 129.44, 128.86, 128.13, 128.09, 127.41, 126.98, 119.85, 113.53, 113.44, 87.84, 86.81, 82.45, 82.17, 81.45, 54.91, 54.86, 34.68, 18.92, 18.83, 18.71. HRMS calc. for C₄₂H₄₂N₅O₈ [M+H]⁺: 744.3033; found: 744.3040.

### Synthesis of Compound 28

[chemical structure]

[1157] To a solution of Compound 27 (200 mg, 0.26 mmol) in THF-MeOH (1:1, v/v; 2 mL) at 0° C. was added NaOH (1 M in water, 0.17 mL, 0.17 mmol), and the mixture was stirred at 0° C. for 5 hours. The reaction mixture was diluted with EtOAc, washed with brine, and dried over Na₂SO₄. The organic phase was evaporated to dryness and purified by silica gel column chromatography (100% EtOAc). Compound 28 was isolated in 72% yield (120 mg). ¹H NMR (400 MHz, DMSO-d6) δH: 1.00 (3H, d, J=6.6 Hz), 1.11 (6H, t, J=6.4 Hz), 2.78 (1H, m), 3.72 (6H, m), 3.82 (1H, s), 3.93 (1H, d, J=2.4 Hz), 4.30 (1H, m), 5.38 (1H, d, J=3.0 Hz), 5.81 (1H, s), 6.81-6.85 (4H, m), 7.09-7.12 (4H, m), 7.19-7.27 (5H, m), 8.07 (1H, m), 11.69 (1H, s), 12.10 (1H, m). ¹³C NMR (126 MHz, DMSO-d6) δC: 180.18, 158.20, 158.15, 154.81, 147.82, 147.73, 144.86, 137.36, 135.70, 135.49, 129.86, 129.70, 127.86, 127.65, 126.76, 120.49, 113.26, 113.22, 90.73, 87.03, 84.45, 83.06, 79.34, 55.02, 54.99, 34.63, 19.63, 18.85. HRMS calc. for C₃₅H₃₈N₅O₇ [M+H]⁺: 640.2771; found: 640.2768.

### Synthesis of Compound 29

[chemical structure]

[1158] To a solution of Compound 28 (100 mg, 0.16 mmol) in DCM (2 mL) were added i-Pr₂NP(Cl)O(CH₂)₂CN (0.18 mL, 0.8 mmol), DIPEA (0.21 mL, 1.2 mmol), and N-methylimidazole (0.06 mL, 0.8 mmol), and the mixture was stirred at room temperature for 2 hours. The reaction mixture was diluted with DCM, washed with saturated aqueous NaHCO₃ and brine, and dried over Na₂SO₄. The organic phase was evaporated to dryness and washed with hexanes several times. The obtained crude mixture was further purified by silica gel column chromatography (100% EtOAc). Compound 29 was isolated in 89% yield (120 mg). ¹H NMR (500 MHz, CDCl₃) δH: 0.95 (1.5H, d, J=6.7 Hz), 1.05 (3H, d, J=6.7 Hz), 1.10 (6H, d, J=6.8 Hz), 1.13-1.16 (13H, m), 1.21-1.24 (10H, m), 2.48-2.65 (6H, m), 3.52-3.64 (5.5H, m), 3.70-3.75 (2H, m), 3.79 (9H, s), 3.91 (0.5H, m), 3.97 (1H, s), 3.99 (0.5H, m), 4.04 (0.5H, m), 4.23 (1H, m), 4.72 (1H, d, J=8.4 Hz), 5.17 (0.5H, d, J=9.4 Hz), 6.07 (0.5H, d, J=2.1 Hz), 6.08 (1H, s), 6.77-6.81 (7H, m), 7.03-7.08 (2.5H, m), 7.10-7.14 (5.5H, m), 7.19 (4H, m), 7.22-7.26 (5H, m), 8.05 (0.5H, s), 8.13 (1H, s), 8.93 (0.5H, s), 9.11 (1H, s), 12.04 (1.5H, m). ¹³C NMR (126 MHz, CDCl₃) δC: 178.92, 178.59, 158.68, 158.66, 155.65, 155.60, 147.82, 147.54, 147.32, 147.13, 144.62, 144.52, 137.83, 137.44, 135.94, 135.85, 135.75, 130.11, 130.01, 130.00, 129.92, 128.10, 128.05, 127.96, 127.06, 122.27, 121.83, 118.60, 117.85, 113.42, 113.28, 90.77, 90.73, 90.71, 88.17, 87.86, 85.41, 85.17, 83.14, 83.09, 82.54, 82.51, 82.14, 82.10, 82.03, 81.99, 60.38, 57.99, 57.39, 57.25, 57.08, 56.94, 55.28, 55.24, 53.41, 43.19, 43.09, 36.05, 35.98, 24.58, 24.54, 24.50, 24.44, 24.37, 21.50, 21.04, 20.56, 20.51, 20.39, 20.34, 19.53, 19.07, 19.01, 19.00, 18.88, 18.81, 14.19. ³¹P NMR (202 MHz, CDCl₃) δP: 150.30, 148.00. HRMS calc. for C₄₄H₅₅N₇O₈P [M+H]⁺: 840.3850; found: 840.3848.

### Synthesis of Compound 31

[chemical structure]

[1159] Compound 31 was synthesized from 1,2-di-O-isopropylidene-a-D-xylofuranose as described in Sun et al., Mar. Drugs. 10:881-889 (2012), which is incorporated herein by reference in its entirety.

### Synthesis of Compound 32

[chemical structure]

[1160] To a solution of Compound 31 (20.0 g, 115 mmol) in DMF (500 mL) were added TBDPSCl (45.0 mL, 173 mmol) and imidazole (27.0 g, 402 mmol), and the mixture was stirred at 80° C. overnight. The solvent was evaporated to dryness and dissolved into EtOAc, washed with saturated aqueous NaHCO₃ and brine, and dried over Na₂SO₄. The organic phase was evaporated to dryness and used for next reaction without further purification.

### Synthesis of Compound 33

[chemical structure]

[1161] To a solution of crude Compound 32 in DCM (1 L) was added 80% aqueous TFA (350 mL), and the mixture was stirred at room temperature overnight. The reaction mixture was washed with water twice and then with saturated aqueous NaHCO₃ and brine, and was dried over Na₂SO₄. The organic phase was evaporated to dryness and purified by silica gel column chromatography (hexanes/EtOAc, 6:4, v/v). Compound 33 was isolated in 58% yield over two steps as a mixture of a and R isomers (25.0 g). ¹H NMR (400 MHz, DMSO-d6) δH: 0.96 (3H, d, J=6.4 Hz), 1.03 (13H, s), 1.08 (3H, d, J=6.5 Hz), 3.77 (1H, m), 3.83 (1H, m), 3.96 (1.4H, m), 4.08 (1H, m), 4.83 (1.4H, m), 5.17 (1.4H, m), 5.92 (1H, d, J=7.3 Hz), 6.03 (1H, d, J=5.4 Hz), 7.38-7.49 (9H, m), 7.58-7.62 (5.2H, m), 7.65-7.68 (1H, m). ¹³C NMR (126 MHz, DMSO-d6) δC: 135.55, 135.39, 135.35, 135.29, 133.35, 133.33, 133.22, 133.11, 129.88, 129.83, 129.74, 127.81, 127.78, 127.75, 127.71, 127.60, 127.60, 102.26, 95.35, 81.73, 79.09, 78.85, 76.59, 75.77, 73.61, 26.80, 26.78, 19.00, 18.97, 16.34, 15.55. HRMS calc. for C₂₁H₂₈NaO₄Si [M+Na]⁺: 395.1655; found: 395.1654.

### Synthesis of Compound 34

[chemical structure]

[1162] To a solution of Compound 33 (25 g, 67.1 mmol) in pyridine (500 mL) were added benzoic anhydride (33.4 g, 148 mmol) and DMAP (8.2 g, 67.1 mmol), and the mixture was stirred at room temperature overnight. The solvent was evaporated to dryness. The resulting mixture was dissolved into EtOAc, washed with saturated aqueous NaHCO₃ and brine, and dried over Na₂SO₄. The organic phase was evaporated to dryness and co-evaporated with toluene. The obtained crude Compound 34 was used for next reaction without further purification (35 g).

### Synthesis of Compound 35

[chemical structure]

[1163] To a solution of crude Compound 34 (13.0 g, 22.4 mmol) in acetonitrile (50 mL) were added thymine (3.0 g, 23.5 mmol) and BSA (24.6 mL, 101 mmol), and the mixture was stirred at 60° C. for 30 minutes. To the reaction mixture was added TMSOTf (6.5 mL, 35.8 mmol), and the mixture was stirred at 60° C. for another 2 hours. The reaction mixture was diluted with EtOAc, washed with saturated aqueous NaHCO₃ and brine, and dried over Na₂SO₄. The organic phase was evaporated to dryness and purified by silica gel column chromatography (hexanes/EtOAc, 1:1, v/v). Compound 35 was obtained with a small amount of an impurity, possibly the a isomer (13.0 g).

### Synthesis of Compound 36

[chemical structure]

[1164] TBAF (1 M in THF, 30.8 mL, 30.8 mmol) was added to the solution of Compound 35 (12.0 g, 20.5 mmol) in THF (200 mL). The reaction was stirred at 0° C. for 2 hours. The reaction mixture was diluted with EtOAc, washed by brine, and dried over Na₂SO₄. The organic phase was evaporated to dryness and purified by silica gel column chromatography (DCM/MeOH, 95:5, v/v), and the obtained crude compound was washed with EtOAc/MeOH (9:1, v/v). Compound 36 was isolated in 54% yield over three steps (7.4 g). ¹H NMR (400 MHz, DMSO-d6) δH: 1.29 (3H, d, J=6.3 Hz), 1.79 (3H, d, J=0.8 Hz), 4.08 (1H, t, J=3.4 Hz), 4.29 (1H, m), 5.16 (1H, s), 5.91 (1H, d, J=4.1 Hz), 5.92 (1H, d, J=1.8 Hz), 7.53-7.57 (2H, m), 7.63 (1H, d, J=1.4 Hz), 7.68-7.71 (2H, m), 8.00-8.02 (2H, m), 11.36 (1H, s). ¹³C NMR (126 MHz, DMSO-d6) δC: 164.54, 163.68, 150.25, 136.50, 133.83, 129.46, 128.81, 128.77, 128.76, 109.22, 87.74, 83.25, 78.62, 73.43, 13.25, 12.41. HRMS calc. for C₁₇H₁₈N₂O₆Na [M+Na]⁺: 369.1063; found: 369.1061.

### Synthesis of Compound 37

[chemical structure]

[1165] To a solution of Compound 36 (8.4 g, 24.3 mmol) in THF-pyridine (4:1, v/v; 250 mL) were added DMTrCl (16.5 g, 48.6 mmol) and AgNO₃ (8.3 g, 48.6 mmol), and the mixture was stirred at room temperature overnight. The reaction mixture was filtered through a celite pad, diluted with EtOAc, washed with saturated aqueous NaHCO₃ and brine, and dried over Na₂SO₄. The organic phase was evaporated to dryness and purified by silica gel column chromatography (hexanes/EtOAc, 4:6, v/v). Compound 37 was isolated in 83% yield (13.1 g). ¹H NMR (400 MHz, DMSO-d6) δH: 1.59 (6H, m), 3.60 (3H, s), 3.64 (3H, s), 3.68 (1H, d, J=2.4 Hz), 4.21 (1H, m), 4.36 (1H, d, J=3.9 Hz), 5.63 (1H, d, J=2.5 Hz), 6.77-6.86 (4H, m), 7.21-7.34 (7H, m), 7.46-7.52 (5H, m), 7.65-7.69 (1H, m), 7.87-7.90 (2H, m). ¹³C NMR (126 MHz, DMSO-d6) δC: 164.34, 163.54, 158.57, 158.53, 149.78, 144.92, 136.15, 135.16, 134.75, 133.76, 129.88, 129.85, 129.46, 128.70, 128.44, 128.09, 127.35, 127.07, 113.51, 113.43, 110.00, 86.86, 86.83, 80.93, 77.56, 76.28, 54.96, 54.92, 54.87, 15.04, 11.75. HRMS calc. for C₃₈H₃₆N₂O₈Na [M+Na]⁺: 671.2369; found: 671.2365.

[chemical structure]

### Synthesis of Compound 38

[1166] To a solution of Compound 37 (6.0 g, 9.3 mmol) in THF-MeOH (1:1, v/v; 100 mL) was added NaOH (1 M in water, 18 mL, 18 mmol), and the mixture was stirred at room temperature for 2 days. The reaction mixture was diluted with EtOAc, washed with brine, and dried over Na₂SO₄. The organic phase was evaporated to dryness and purified by silica gel column chromatography (hexanes/EtOAc, 3:7, v/v). Compound 38 was isolated in 97% yield (4.9 g). ¹H NMR (400 MHz, DMSO-d6) δH: 1.50 (3H, d, J=6.4 Hz), 1.62 (3H, s), 2.73 (1H, m), 3.73 (6H, s), 3.86 (1H, m), 4.18 (1H, m), 5.28 (1H, d, J=3.8 Hz), 5.37 (1H, d, J=1.5 Hz), 6.85-6.89 (4H, m), 7.21-7.39 (9H, m), 7.54 (1H, m), 11.24 (1H, s). ¹³C NMR (126 MHz, DMSO-d6) δC: 163.71, 158.27, 158.25, 150.09, 145.13, 136.50, 135.81, 135.26, 129.85, 127.95, 127.58, 126.82, 113.41, 113.32, 108.04, 89.54, 86.49, 78.27, 77.87, 77.37, 55.07, 55.06, 15.16, 12.11. HRMS calc. for C₃1H₃₂N₂O₇Na [M+Na]⁺: 567.2107; found: 567.2119.

### Synthesis of Compound 39

[chemical structure]

[1167] To a solution of Compound 38 (4.9 g, 9.0 mmol) in DCM (100 mL) were added iPr₂NP(Cl)O(CH₂)₂CN (3.2 mL, 14.4 mmol), DIPEA (5.5 mL, 31.5 mmol), and N-methylimidazole (1.4 mL, 18.0 mmol), and the mixture was stirred at room temperature for 3 hours. The reaction mixture was diluted with DCM, washed with saturated aqueous NaHCO₃ and brine, and dried over Na₂SO₄. The organic phase was evaporated to dryness and purified by silica gel column chromatography (hexanes/EtOAc, 1:1, v/v). Compound 39 was isolated in 85% yield (5.7 g). ¹H NMR (500 MHz, CDCl₃) δH: 1.02 (4H, d, J=6.8 Hz), 1.09-1.12 (9H, m), 1.45 (1.3H, d, J=6.4 Hz), 1.62 (2H, d, J=6.4 Hz), 1.75 (1.7H, s), 1.83 (1.3H, s), 2.23-2.39 (1H, m), 2.54 (1H, m), 3.16 (0.6H, d, J=7.2 Hz), 3.47-3.61 (4H, m), 3.69 (0.7H, m), 3.78 (6H, s), 3.97 (0.6H, d, J=2.8 Hz), 4.09 (0.6H, d, J=3.1 Hz), 4.37 (1H, m), 5.69 (1H, m), 6.80-6.83 (4H, m), 7.20-7.29 (8H, m), 7.35-7.40 (2H, m), 7.69 (1H, m), 8.50 (1H, m). ¹³C NMR (126 MHz, CDCl₃) δC: 164.18, 164.14, 158.96, 158.93, 150.23, 149.93, 145.06, 145.02, 137.55, 137.27, 136.01, 135.95, 135.63, 135.49, 130.50, 130.44, 130.28, 130.24, 128.37, 128.31, 128.04, 127.37, 127.33, 118.14, 117.70, 113.90, 113.86, 113.71, 113.69, 109.46, 109.14, 90.46, 90.40, 90.18, 87.95, 87.71, 81.53, 81.41, 81.22, 81.10, 80.52, 80.00, 78.09, 78.03, 58.37, 58.21, 58.15, 57.99, 55.49, 55.47, 43.57, 43.47, 24.74, 24.73, 24.70, 24.67, 24.64, 24.55, 24.48, 20.17, 20.11, 20.04, 15.19, 14.98, 12.79, 12.64. ³¹P NMR (202 MHz, CDCl₃) SP: 150.74, 151.24. HRMS calc. for C₄₀H₅₀N₄O₈P [M+H]⁺: 745.3366; found: 745.3375.

### Synthesis of Compound 41

[chemical structure]

[1168] To a solution of Compound 38 (5.7 g, 8.8 mmol) in acetonitrile (100 mL) at 0° C. were added NEt₃ (18.4 mL, 132 mmol), 1,2,4-triazole (9.0 g, 132 mmol), and POCl₃ (2.4 mL, 26.4 mmol), and the mixture was stirred at 0° C. for 4 h. The reaction mixture was diluted with EtOAc, washed with saturated NaHCO₃ (aq.) and brine, and dried over Na₂SO₄. The organic phase was evaporated to dryness and used for next reaction without further purification.

### Synthesis of Compound 42

[chemical structure]

[1169] To a solution of crude Compound 41 in 1,4-dioxane (100 mL) was added 28% aqueous NH₄OH (24 mL), and the mixture was stirred at room temperature overnight. The solvent was evaporated to dryness. To a solution of resulting mixture in THF-MeOH (1:1, v/v; 70 mL) was added NaOH (1 M in water, 30 mL, 30 mmol), and the mixture was stirred at room temperature for 2 days. The reaction mixture was diluted with DCM, washed with brine, and dried over Na₂SO₄. The organic phase was evaporated to dryness and used for next reaction without further purification (3.8 g).

### Synthesis of Compound 43

[chemical structure]

[1170] To a solution of crude Compound 42 in DMF (80 mL) was added benzoic anhydride (1.7 g, 7.4 mmol), and the mixture was stirred at room temperature overnight. The reaction mixture was diluted with EtOAc, washed with saturated aqueous NaHCO₃ and brine, and dried over Na₂SO₄. The organic phase was evaporated to dryness and purified by silica gel column chromatography (hexanes/EtOAc, 6:4, v/v). Compound 43 was isolated in 84% yield over four steps (4.0 g). ¹H NMR (400 MHz, DMSO-d6) δH: 1.60 (3H, d, J=6.5 Hz), 1.91 (3H, s), 2.49 (1H, m), 2.75 (1H, d, J=3.7 Hz), 3.72 (6H, m), 3.87 (1H, d, J=3.1 Hz), 4.36 (1H, m), 5.38 (1H, s), 5.44 (1H, d, J=3.7 Hz), 6.83-6.88 (4H, m), 7.17-7.27 (5H, m), 7.29 (2H, t, J=7.6 Hz), 7.35 (2H, d, J=7.5 Hz), 7.47 (2H, t, J=7.5 Hz), 7.57 (1H, t, J=7.3 Hz), 7.85 (1H, s), 8.14 (2H, d, J=6.0 Hz), 12.97 (1H, s). ¹³C NMR (101 MHz, DMSO-d6) δC: 158.24, 158.22, 145.02, 135.80, 135.19, 132.42, 129.74, 129.72, 129.20, 128.26, 127.96, 127.53, 126.81, 113.44, 113.35, 90.76, 86.54, 79.42, 77.67, 77.20, 55.03, 14.96, 13.21. HRMS calc. for C₃₈H₃₈N₃O₇ [M+H]⁺: 648.2710; found: 648.2720.

### Synthesis of Compound 44

[chemical structure]

[1171] To a solution of Compound 43 (3.3 g, 5.1 mmol) in DCM (50 mL) were added iPr₂NP(Cl)O(CH₂)₂CN (1.8 mL, 8.2 mmol), DIPEA (3.1 mL, 17.8 mmol), and N-methylimidazole (0.8 mL, 10.2 mmol), and the mixture was stirred at room temperature for 3 hours. The reaction mixture was diluted with DCM, washed with saturated aqueous NaHCO₃ and brine, and dried over Na₂SO₄. The organic phase was evaporated to dryness and purified by silica gel column chromatography (hexanes/EtOAc, 8:2, v/v). Compound 44 was isolated in 92% yield (4.0 g). ¹H NMR (400 MHz, CDCl₃) δH: 1.02 (6H, d, J=6.8 Hz), 1.11-1.14 (15.8H, m), 1.20 (1.8H, d, J=6.8 Hz), 1.53 (2.2H, d, J=6.5 Hz), 1.67 (3H, d, J=6.4 Hz), 1.97 (3H, s), 2.06 (2.2H, s), 2.23-2.29 (0.8H, m), 2.33-2.41 (0.8H, m), 2.52-2.67 (2.7H, m), 3.20 (1H, d, J=7.4 Hz), 3.48-3.63 (8.1H, m), 3.79 (11.6H, m), 3.98 (1H, d, J=2.9 Hz), 4.08 (0.8H, d, J=3.1 Hz), 4.42-4.49 (1.9H, m), 5.69 (0.8H, d, J=1.5 Hz), 5.71 (1H, s), 6.80-6.83 (7.4H, m), 7.20-7.53 (25.2H, m), 7.85 (1H, s), 7.88 (1H, s), 8.31 (3.6H, m), 13.37 (1.7H, m). ¹³C NMR (101 MHz, CDCl₃) δC: 179.55, 160.17, 160.13, 158.80, 158.76, 147.55, 147.49, 144.85, 144.77, 138.77, 138.33, 137.37, 135.79, 135.72, 135.47, 135.31, 132.28, 130.24, 130.18, 130.02, 129.99, 129.85, 128.22, 128.14, 128.10, 128.07, 127.87, 127.18, 117.96, 117.55, 113.75, 113.72, 113.55, 110.05, 109.85, 90.91, 90.84, 90.55, 87.76, 87.55, 80.93, 80.88, 80.83, 80.79, 80.68, 80.30, 60.41, 58.26, 58.06, 57.86, 55.32, 55.30, 43.43, 43.30, 24.65, 24.58, 24.54, 24.51, 24.48, 24.42, 24.32, 21.07, 20.02, 19.95, 19.92, 19.84, 15.00, 14.80, 14.21, 13.78, 13.59. ³¹P NMR (202 MHz, CDCl₃) δP: 150.59, 151.14. HRMS calc. for C₄₇H₅₅N₅O₈P [M+H]⁺: 848.3788; found: 848.3782.

### Synthesis of Compound 46

[chemical structure]

[1172] To a solution of crude Compound 34 (6.6 g, 12 mmol) in toluene (24 mL) were added N6-benzoyladenine (2.9 g, 12 mmol) and BSA (11.7 mL, 48 mmol), and the mixture was stirred at 95° C. for 30 minutes. To the reaction mixture was added TMSOTf (3.5 mL, 19.2 mmol), and the mixture was stirred at 95° C. for another 2 hours. The reaction mixture was diluted with EtOAc, washed with saturated aqueous NaHCO₃ and brine, and dried over Na₂SO₄. The organic phase was evaporated to dryness and purified by silica gel column chromatography (hexanes/EtOAc, 6:4, v/v). Compound 46 was obtained with a small amount of an impurity, possibly the a isomer or the N-7 isomer (4.3 g).

### Synthesis of Compound 47

[chemical structure]

[1173] To a solution of crude Compound 46 in THF (60 mL) was added TBAF (1 M in THF, 7.4 mL, 7.4 mmol), and the mixture was stirred at 0° C. for 2 hours. The reaction mixture was diluted with EtOAc, washed with brine, and dried over Na₂SO₄. The organic phase was evaporated to dryness and purified by silica gel column chromatography (hexanes/EtOAc, 3:7, v/v, then 100% EtOAc). Compound 47 was isolated in 46% yield over three steps (1.7 g). ¹H NMR (500 MHz, DMSO-d6) δH: 1.36 (3H, d, J=6.3 Hz), 4.28 (1H, t, J=3.9 Hz), 4.48 (1H, m), 5.60 (1H, s), 6.15 (1H, d, J=4.9 Hz), 6.34 (1H, d, J=1.5 Hz), 7.54-7.59 (4H, m), 7.63-7.66 (1H, m), 7.70-7.73 (1H, m), 8.60 (1H, s), 8.75 (1H, s), 11.23 (1H, s). ¹³C NMR (101 MHz, DMSO-d6) δC: 165.56, 164.63, 151.71, 151.64, 150.39, 142.91, 133.89, 133.27, 132.44, 129.56, 128.82, 128.73, 128.46, 128.44, 125.37, 86.70, 83.14, 79.50, 73.57, 54.87, 13.62. HRMS calc. for C₂₄H₂₂N₅O₅ [M+H]⁺: 460.1621; found: 460.1620.

### Synthesis of Compound 48

[chemical structure]

[1174] To a solution of Compound 47 (1.7 g, 3.7 mmol) in THF-pyridine (4:1, v/v; 40 mL) were added DMTrCl (338.83 g/mol, 3.0 eq., 3.8 g, 11.1 mmol) and AgNO₃ (169.87 g/mol, 3.0 eq., 1.9 g, 11.1 mmol), and the mixture was stirred at room temperature overnight. The reaction mixture was filtered through a celite pad, diluted with EtOAc, washed with saturated aqueous NaHCO₃ and brine, and dried over Na₂SO₄. The organic phase was evaporated to dryness and purified by silica gel column chromatography (hexanes/EtOAc, 4:6, v/v). Compound 48 was isolated in 89% yield (2.5 g). ¹H NMR (400 MHz, DMSO-d6) δH: 1.48 (3H, d, J=6.4 Hz), 3.60 (3H, s), 3.64 (3H, s), 4.10 (1H, m), 4.60 (1H, dd, J=3.0, 4.9 Hz), 5.01 (1H, t, J=3.3 Hz), 6.07 (1H, d, J=3.4 Hz), 6.74 (2H, m), 6.82 (2H, m), 7.19-7.34 (7H, m), 7.46 (2H, m), 7.50-7.56 (4H, m), 7.62-7.71 (2H, m), 7.91 (2H, m), 8.04 (2H, m), 8.52 (1H, s), 8.70 (1H, s), 11.23 (1H, s). ¹³C NMR (101 MHz, DMSO-d6) δC: 165.61, 164.65, 158.48, 158.42, 151.92, 151.85, 150.48, 144.90, 142.42, 135.36, 134.96, 133.92, 133.24, 132.51, 130.13, 129.94, 129.65, 128.74, 128.52, 128.48, 128.41, 128.07, 127.64, 127.07, 125.27, 113.44, 113.37, 87.00, 85.16, 80.02, 77.79, 76.30, 54.95, 15.98. HRMS calc. for C₄₅H₄₀N₅O₇ [M+H]⁺: 762.2928; found: 762.2930.

### Synthesis of Compound 49

[chemical structure]

[1175] To a solution of Compound 48 (2.2 g, 2.9 mmol) in THF-MeOH (1:1, v/v; 30 mL) was added NaOH (1 M in water, 3.8 mL, 3.8 mmol), and the mixture was stirred at 0° C. for 5 hours. The reaction mixture was diluted with EtOAc, washed with brine, and dried over Na₂SO₄. The organic phase was evaporated to dryness and purified by silica gel column chromatography (hexanes/EtOAc, 1:9, v/v, then DCM/MeOH, 95:5, v/v). Compound 49 was isolated in 68% yield (1.3 g). ¹H NMR (400 MHz, DMSO-d6) δH: 1.38 (3H, d, J=6.4 Hz), 3.69 (3H, s), 3.70 (3H, s), 3.84 (1H, m), 3.94 (1H, m), 4.10 (1H, t, J=4.1 Hz), 5.71 (1H, d, J=4.5 Hz), 5.78 (1H, d, J=3.0 Hz), 6.75-6.82 (4H, m), 7.17-7.27 (7H, m), 7.35-7.38 (2H, m), 7.52-7.55 (2H, m), 7.61-7.65 (1H, m), 8.02-8.04 (2H, m), 8.52 (1H, s), 8.69 (1H, s), 11.17 (1H, s). ¹³C NMR (126 MHz, DMSO-d6) δC: 166.09, 158.68, 158.64, 152.23, 151.93, 150.60, 145.47, 142.94, 136.28, 135.88, 133.80, 132.86, 130.48, 130.39, 128.92, 128.88, 128.32, 128.28, 127.27, 126.38, 113.69, 113.61, 88.40, 86.93, 78.29, 78.20, 76.88, 55.48, 55.45, 16.59. HRMS calc. for C₃₈H₃₆N₅O₆ [M+H]⁺: 658.2666; found: 658.2676.

### Synthesis of Compound 50

[chemical structure]

[1176] To a solution of Compound 49 (200 mg, 0.3 mmol) in DCM (3 mL) were added i-Pr₂NP(Cl)O(CH₂)₂CN (0.4 mL, 1.84 mmol), DIPEA (0.5 mL, 3.0 mmol), and N-methylimidazole (0.17 mL, 2.1 mmol), and the mixture was stirred at room temperature for 2 hours. The reaction mixture was diluted with DCM, washed with saturated aqueous NaHCO₃ and brine, and dried over Na₂SO₄. The organic phase was evaporated to dryness and purified by silica gel column chromatography (hexanes/EtOAc, 1:1, v/v). Compound 50 was isolated in 89% yield (230 mg). ¹H NMR (400 MHz, CDCl₃) δH: 1.09-1.16 (28H, m), 1.20-1.30 (6H, m), 1.46 (3H, d, J=6.4 Hz), 1.64 (3H, d, J=6.4 Hz), 2.26-2.39 (2H, m), 2.45-2.58 (2H, m), 3.53-3.62 (9H, m), 3.76 (14H, m), 4.08 (1H, d, J=3.7 Hz), 4.19 (2H, m), 4.47 (2H, m), 6.06 (1H, s), 6.11 (1H, s), 6.68-6.75 (9H, m), 7.08-7.28 (22H, m), 7.52 (4H, m), 7.60 (2H, m), 8.03 (4H, m), 8.48 (2H, m), 8.72 (2H, m), 9.10 (2H, m). ¹³C NMR (101 MHz, CDCl₃) δC: 164.76, 164.73, 158.87, 158.84, 152.52, 152.37, 151.33, 149.39, 149.31, 144.82, 144.79, 142.38, 142.01, 135.92, 135.80, 135.65, 135.51, 134.07, 134.04, 132.87, 130.50, 130.48, 130.35, 130.18, 129.03, 128.43, 128.27, 128.17, 128.03, 127.27, 127.24, 123.41, 123.25, 117.59, 113.73, 113.54, 113.51, 89.48, 89.41, 89.29, 87.95, 87.76, 81.18, 81.12, 81.02, 80.99, 80.77, 80.48, 58.52, 58.44, 58.32, 58.23, 55.43, 55.41, 43.72, 43.65, 43.59, 43.52, 24.83, 24.80, 24.77, 24.75, 24.72, 24.58, 24.50, 20.20, 20.13, 20.06, 15.68, 15.47. ³¹P NMR (202 MHz, CDCl₃) δP: 152.09, 151.22. HRMS calc. for C₄₇H₅₃N₇O₇P [M+H]⁺: 858.3744; found: 858.3749.

### Synthesis of Compound 52

[chemical structure]

[1177] To a solution of crude Compound 34 (10.4 g, 16.6 mmol) in toluene (30 mL) were added BSA (16.2 mL, 66.4 mmol) and N-2-isobutyryl-O-6-diphenylcarbamoyl guanosine (6.9 g, 16.6 mmol), and the mixture was stirred at 95° C. for 1 hour. To the reaction mixture were added TMSOTf (4.8 mL, 26.6 mmol), and the mixture was stirred at 95° C. for another 2 hours. The reaction mixture was diluted with EtOAc, washed with saturated aqueous NaHCO₃ and brine, and dried over Na₂SO₄. The organic phase was evaporated to dryness and purified by silica gel column chromatography (hexanes/EtOAc, 7:3, v/v). Compound 52 was obtained with a small amount of an impurity, possibly the a or N-7 isomer (6.9 g).

### Synthesis of Compound 53

[chemical structure]

[1178] To a 20% TFA solution in DCM (120 mL) was added crude Compound 52 (6.9 g), and the mixture was stirred at 0° C. for 1 hour. The reaction was quenched by adding NaHCO₃. The reaction mixture was diluted with EtOAc, washed with saturated aqueous NaHCO₃ and brine, and dried over Na₂SO₄. The organic phase was evaporated to dryness and purified by silica gel column chromatography (hexanes/EtOAc, 4:6, v/v, then 100% EtOAc). Compound 53 was obtained with a small amount of an impurity (3.8 g).

### Synthesis of Compound 54

[chemical structure]

[1179] To a solution of crude Compound 53 (3.8 g) in THE (60 mL) was added TBAF (1 M in THF, 8.7 mL, 8.7 mmol), and the mixture was stirred at 0° C. for 2 hours. The reaction mixture was diluted with EtOAc, washed with brine, and dried over Na₂SO₄. The organic phase was evaporated to dryness and purified by silica gel column chromatography (DCM/MeOH, 97.5:2.5, v/v). Compound 54 was isolated in 26% yield over four steps (1.9 g). ¹H NMR (500 MHz, DMSO-d6) δH: 1.07 (3H, d, J=3.0 Hz), 1.08 (3H, d, J=3.0 Hz), 1.32 (3H, d, J=6.3 Hz), 2.70 (1H, m), 4.22 (1H, t, J=3.5 Hz), 4.44 (1H, m), 5.45 (1H, s), 6.01 (1H, d, J=1.3 Hz), 6.06 (1H, d, J=4.1 Hz), 7.57 (2H, t, J=7.8 Hz), 7.71 (1H, t, J=7.4 Hz), 8.02 (2H, m), 8.16 (1H, s), 11.59 (1H, s), 12.09 (1H, s). ¹³C NMR (126 MHz, DMSO-d6) δC: 180.08, 164.47, 154.75, 148.30, 148.27, 137.94, 134.01, 129.53, 128.91, 128.65, 119.65, 86.23, 83.31, 79.61, 73.39, 34.69, 18.85, 18.74, 13.53. HRMS calc. for C₂₁H₂₄N₅O₆ [M+H]⁺: 442.1727; found: 442.1727.

### Synthesis of Compound 55

[chemical structure]

[1180] To a solution of Compound 54 (1.9 g, 5.4 mmol) in THF-pyridine (4:1, v/v; 40 mL) were added DMTrCl (4.4 g, 12.9 mmol) and AgNO₃ (2.2 g, 12.9 mmol), and the mixture was stirred at 50° C. for 3 hours. The reaction mixture was filtered through a celite pad, diluted with EtOAc, washed with saturated aqueous NaHCO₃ and brine, and dried over Na₂SO₄. The organic phase was evaporated to dryness and purified by silica gel column chromatography (hexanes/EtOAc, 4:6, v/v, then 100% EtOAc). Compound 55 was isolated in 98% yield (3.2 g). ¹H NMR (400 MHz, DMSO-d6) δH: 1.06 (6H, d, J=6.8 Hz), 1.55 (3H, d, J=6.4 Hz), 2.68 (1H, m), 3.62 (3H, s), 3.65 (3H, s), 4.25 (1H, m), 4.37 (1H, s), 4.51 (1H, d, J=4.0 Hz), 5.69 (1H, d, J=2.5 Hz), 6.77-6.85 (4H, m), 7.23 (1H, t, J=7.2 Hz), 7.28-7.36 (6H, m), 7.46-7.54 (4H, m), 7.69 (1H, t, J=7.4 Hz), 7.91 (2H, m), 8.04 (1H, s), 11.53 (1H, s), 12.09 (1H, s). ¹³C NMR (101 MHz, DMSO-d6) δC: 180.09, 164.46, 158.53, 158.49, 154.69, 148.40, 144.80, 136.96, 135.28, 134.79, 133.99, 130.03, 129.83, 129.57, 128.80, 128.24, 128.10, 127.50, 127.07, 119.60, 113.50, 113.43, 87.13, 85.05, 80.96, 78.29, 76.28, 54.97, 54.92, 34.66, 18.84, 18.70, 15.63. HRMS calc. for C₄₂H₄₂N₅O₈[M+H]⁺: 744.3033; found: 744.3039.

### Synthesis of Compound 56

[chemical structure]

[1181] To a solution of Compound 55 (3.2 g, 4.3 mmol) in THF-MeOH (1:1, v/v; 40 mL) was added NaOH (1 M in water, 5.6 mL, 5.6 mmol), and the mixture was stirred at 0° C. for 5 hours. The reaction mixture was diluted with EtOAc, washed with brine, and dried over Na₂SO₄. The organic phase was evaporated to dryness and purified by silica gel column chromatography (hexanes/EtOAc, 3:7, v/v, then 100% EtOAc). Compound 56 was isolated in 78% yield (2.2 g). ¹H NMR (400 MHz, DMSO-d6) δH: 1.10 (3H, d, J=6.7 Hz), 1.12 (3H, d, J=6.9 Hz), 1.42 (3H, d, J=6.1 Hz), 2.77 (1H, m), 3.38 (1H, s), 3.70 (6H, m), 4.04-4.10 (2H, m), 5.42 (1H, d, J=3.9 Hz), 5.50 (1H, d, J=2.2 Hz), 6.77-6.83 (4H, m), 7.17-7.22 (5H, m), 7.27 (2H, t, J=7.5 Hz), 7.35 (2H, d, J=7.5 Hz), 8.03 (1H, s), 11.62 (1H, s), 12.09 (1H, s). ¹³C NMR (101 MHz, DMSO-d6) δC: 180.18, 158.23, 158.18, 154.71, 147.95, 147.81, 144.97, 137.24, 135.88, 135.27, 130.05, 129.87, 127.84, 127.74, 126.77, 120.34, 113.20, 113.09, 87.92, 86.46, 78.21, 77.85, 77.17, 55.00, 54.96, 34.61, 18.87, 18.81, 15.81. HRMS calc. for C₃₅H₃₈N₅O₇ [M+H]⁺: 640.2771; found: 640.2761.

### Synthesis of Compound 57

[chemical structure]

[1182] To a solution of Compound 56 (2.2 g, 3.4 mmol) in DCM (30 mL) were added i-Pr₂NP(Cl)O(CH₂)₂CN (2.3 mL, 10.3 mmol), DIPEA (3.0 mL, 17.2 mmol) and N-methylimidazole (0.82 mL, 10.3 mmol), and the mixture was stirred at room temperature for 2 hours. The reaction mixture was diluted with DCM, washed with saturated aqueous NaHCO₃ and brine, and dried over Na₂SO₄. The organic phase was evaporated to dryness and purified by silica gel column chromatography (hexanes/EtOAc, 3:7, v/v, then 100% EtOAc). Compound 57 was isolated in 74% yield (2.1 g). ¹H NMR (500 MHz, CDCl₃) δH: 1.05-1.08 (12H, m), 1.11-1.14 (14H, m), 1.20-1.28 (18H, m), 1.48 (3H, d, J=6.5 Hz), 2.38-2.45 (3H, m), 2.50-2.63 (5H, m), 2.84 (1H, s), 3.52-3.58 (8H, m), 3.64-3.70 (1H, m), 3.77 (12H, m), 3.84 (1H, d, J=7.6 Hz), 3.91 (1H, t, J=5.1 Hz), 4.17 (1H, d, J=3.4 Hz), 4.21 (1H, m), 4.27 (1H, m), 4.41 (1H, m), 4.68 (1H, d, J=9.3 Hz), 5.72 (1H, s), 5.83 (1H, s), 6.75-6.78 (8H, m), 7.16-7.32 (22H, m), 8.01 (1H, s), 8.12 (1H, s), 8.67 (1H, s), 8.92 (1H, s), 11.98 (1H, s), 12.04 (1H, s). ¹³C NMR (126 MHz, CDCl₃) δC: 178.93, 178.46, 158.69, 158.67, 158.63, 155.60, 155.54, 147.76, 147.52, 147.32, 146.98, 144.59, 144.39, 138.14, 138.01, 135.83, 135.76, 135.55, 135.24, 130.54, 130.44, 130.41, 130.16, 128.47, 128.19, 128.06, 127.90, 127.08, 127.06, 122.02, 121.32, 118.46, 117.84, 113.44, 113.23, 88.72, 88.67, 87.69, 87.57, 81.51, 81.40, 80.48, 80.35, 80.10, 80.00, 78.08, 78.03, 57.95, 57.58, 57.45, 57.41, 57.27, 55.26, 55.22, 43.28, 43.18, 36.20, 36.00, 24.54, 24.50, 24.46, 24.36, 24.29, 21.48, 20.43, 20.37, 20.31, 19.09, 18.98, 18.87, 18.69, 15.78, 15.37. ³¹P NMR (202 MHz, CDCl₃) δP: 150.72, 149.47. HRMS calc. for C₄₄H₅₅N₇O₈P [M+H]⁺: 840.3850; found: 840.3848.

### General Procedure for Synthesis of CPG Support (Compounds 13, 17, 23, 30, 40, 45, 51, and 58)

[1183] To a solution of the precursor for CPG loading (0.1 M) in DCM were added succinic anhydride (2.0 eq.) and DMAP (3.0 eq.), and the mixture was stirred at room temperature overnight. The solution was purified by silica gel column chromatography (DCM/MeOH, 95:5, v/v, then DCM/MeOH, 8:2, v/v). To a solution of obtained succinate (0.015 M) in DMF were added DIPEA (2.0 eq.), HBTU (1.2 eq.), and lcaa-CPG, and the mixture was agitated on a wrist action shaker at room temperature overnight. The resulting mixture was filtered and washed with DCM and DCM/MeOH (9/1, v/v). A suspension of obtained CPG support in pyridine-Ac₂O (3:1, v/v, 30-50 mL) was agitated on a wrist action shaker at room temperature overnight. The resulting mixture was filtered and washed with DCM and DCM/MeOH (9:1, v/v). The CPG support was dried under vacuum at room temperature.

### Preparation of CPG Support 13

[chemical structure]

[1184] CPG support 13 was obtained (4.6 g, 111.4 mol/g) from compound 11 (370 mg, 0.68 mmol) and CPG (pore size 528 Å NH₂, loading of 171 μmol/g, 4.4 g).

### Preparation of CPG Support 17

[chemical structure]

[1185] CPG support 17 was obtained (3.8 g, 90.3 mol/g) from compound 15 (370 mg, 0.57 mmol) and CPG (pore size 528 Å NH₂, loading of 171 μmol/g, 3.7 g).

### Preparation of CPG Support 23

[chemical structure]

[1186] CPG support 23 was obtained (3.8 g, 113.7 mol/g) from compound 21 (370 mg, 0.56 mmol) and CPG (pore size 528 Å NH₂, loading of 171 μmol/g, 3.6 g).

### Preparation of CPG Support 30

[chemical structure]

[1187] CPG support 30 was obtained (3.0 g, 84.7 mol/g) from compound 28 (300 mg, 0.47 mmol) and CPG (pore size 528 Å NH₂, loading of 171 μmol/g, 3.0 g).

### Preparation of CPG Support 40

[chemical structure]

[1188] CPG support 40 was obtained (4.1 g, 40.0 mol/g) from compound 38 (200 mg, 0.37 mmol) and CPG (pore size 917 Å NH₂, loading of 96 μmol/g, 4.3 g).

### Preparation of CPG Support 45

[chemical structure]

[1189] CPG support 45 was obtained (5.4 g, 75.3 mol/g) from compound 43 (500 mg, 0.77 mmol) and CPG (pore size 508 Å NH₂, loading of 152 μmol/g, 5.6 g).

Preparation of CPG support 51

[chemical structure]

[1190] CPG support 51 was obtained (4.4 g, 63.2 mol/g) from compound 49 (400 mg, 0.6 mmol) and CPG (pore size 528 Å NH₂, loading of 171 μmol/g, 4.4 g).

Preparation of CPG support 58

[chemical structure]

[1191] CPG support 58 was obtained (3.2 g, 101.3 mol/g) from compound 56 (300 mg, 0.47 mmol) and CPG (pore size 528 Å NH₂, loading of 171 μmol/g, 3.0 g).

### Example 3: Synthesis of Exemplary TNA Monomers

[chemical structure]

[1192] 1-[(3R,4S)-4-[bis(4-methoxyphenyl)-phenyl-methoxy]-3-hydroxy-tetrahydrofuran-2-yl]pyrimidine-2,4-dione (205 mg, 396.87 mol) was solubilized in dichloromethane (5 mL) and placed under argon. Then N,N-diisopropylethylamine (153.87 mg, 1.19 mmol, 207.38 L) and benzoyl chloride (83.68 mg, 595.31 mol, 69.16 L) were added. The mixture was stirred overnight at room temperature. The reaction mixture was then diluted with CH₂Cl₂ (10 mL) and NaHCO₃ saturated solution (50 mL). The organic layer was separated. The organic layer was then dried over anhydrous Na₂SO₄ and filtered, and the filtrate was evaporated to dryness. The crude compound thus obtained was purified by flash chromatography (Gradient: 0-100% AcOEt in hexane) to afford the white foam [(3R,4S)-2-(3-benzoyl-2,4-dioxo-pyrimidin-1-yl)-4-[bis(4-methoxyphenyl)-phenyl-methoxy]tetrahydrofuran-3-yl]benzoate (246.32 mg, 339.87 mol, 85.64% yield). ¹H NMR (600 MHz, CD₃CN) 6 7.97-7.90 (m, 3H), 7.86 (d, J=8.2 Hz, 1H), 7.77-7.71 (m, 1H), 7.64-7.59 (m, 1H), 7.58-7.52 (m, 2H), 7.52-7.43 (m, 4H), 7.40-7.34 (m, 4H), 7.30 (dd, J=8.5, 7.0 Hz, 2H), 7.26-7.21 (m, 1H), 6.87-6.80 (m, 4H), 5.83 (d, J=8.2 Hz, 1H), 5.79 (d, J=2.3 Hz, 1H), 5.06 (t, J=2.2 Hz, 1H), 4.50 (dt, J=4.5, 2.2 Hz, 1H), 3.81 (qd, J=10.1, 3.4 Hz, 2H), 3.72 (s, 3H), 3.71 (s, 3H). ¹³C NMR (151 MHz, CD₃CN) δ 165.54, 163.13, 160.00 (d), 150.17, 145.96, 142.25, 136.62, 136.38, 134.61, 132.42, 131.14 (d), 131.00, 130.56, 130.38, 129.92, 129.54, 129.07, 128.71, 128.07, 114.38 (d), 102.46, 90.73, 89.07, 81.73, 76.91, 75.08, 55.84 (d).

[chemical structure]

[1193] [(3R,4S)-2-(3-benzoyl-2,4-dioxo-pyrimidin-1-yl)-4-[bis(4-methoxyphenyl)-phenyl-methoxy]tetrahydrofuran-3-yl]benzoate (560 mg, 772.68 mol) was solubilized in anhydrous MeOH/CH3CN (10 mL). Three mL of ACN was added to obtain clear solution. ICl (125.45 mg, 772.68 mol) was added and mixture was heated at 60° C. overnight. The solvent was evaporated, the residue was solubilized in CH₂Cl₂, and the organic layer was washed with NaHCO₃ saturated solution and dried over Na₂SO₄. After evaporation, the residue was purified by flash chromatography (hexane/AcOEt, 0 to 100% MeOH) to afford the orange foam [(3R,4S)-2-(3-benzoyl-5-iodo-2,4-dioxo-pyrimidin-1-yl)-4-hydroxy-tetrahydrofuran-3-yl]benzoate (222 mg, 404.90 mol, 52.40% yield). ¹H NMR (600 MHz, CD3CN) δ 8.06-8.01 (m, 2H), 8.01-7.95 (m, 2H), 7.90 (d, J=8.3 Hz, 1H), 7.75 (ddt, J=8.7, 7.4, 1.3 Hz, 1H), 7.64 (tt, J=7.8, 1.3 Hz, 1H), 7.60-7.54 (m, 2H), 7.50 (ddt, J=7.4, 6.3, 1.2 Hz, 2H), 6.03 (d, J=1.7 Hz, 1H), 5.84 (d, J=8.3 Hz, 1H), 5.38 (q, J=1.4 Hz, 1H), 4.46 (dt, J=3.3, 1.5 Hz, 1H), 4.28-4.19 (m, 2H). ¹³C NMR (151 MHz, CD₃CN) δ 170.43, 165.98, 163.21, 150.40, 142.53, 136.37, 134.65, 132.45, 131.19, 130.53, 130.37, 130.10, 129.62, 102.19, 91.08, 83.11, 76.56, 74.03.

[chemical structure]

[1194] [(3R,4S)-2-(3-benzoyl-5-iodo-2,4-dioxo-pyrimidin-1-yl)-4-hydroxy-tetrahydrofuran-3-yl]benzoate (512 mg, 933.82 mol) was dissolved in dichloromethane (3 mL). 2,4,6-collidine, 99% (452.64 mg, 3.74 mmol, 494.15 L) and 4,4′-dimethoxytrityl chloride (569.53 mg, 1.68 mmol) were added, and the mixture was stirred at room temperature overnight under argon. MeOH (1 mL) was added, the crude was diluted with CH₂Cl₂, and the organic layer was washed with saturated aqueous solution of NaHCO₃ and brine. The organic layer was then dried over Na₂SO₄ and the solvent was evaporated. The residue was purified by flash chromatography (hexane/AcOEt, 0 to 100% AcOEt, the column was first neutralized with 3% NEt₃ in hexane) to afford the yellow foam [(3R,4S)-2-(3-benzoyl-5-iodo-2,4-dioxo-pyrimidin-1-yl)-4-[bis(4-methoxyphenyl)-phenyl-methoxy]tetrahydrofuran-3-yl]benzoate (642.7 mg, 755.54 mol, 80.91% yield). ¹H NMR (600 MHz, CD₃CN) δ 7.98-7.89 (m, 4H), 7.86 (d, J=8.3 Hz, 1H), 7.74 (tt, J=7.6, 1.3 Hz, 1H), 7.62 (ddt, J=8.7, 7.4, 1.3 Hz, 1H), 7.56-7.49 (m, 4H), 7.41-7.33 (m, 4H), 7.30 (dd, J=8.4, 7.0 Hz, 2H), 7.27-7.20 (m, 1H), 6.88-6.79 (m, 4H), 5.83 (d, J=8.2 Hz, 1H), 5.79 (d, J=2.3 Hz, 1H), 5.06 (t, J=2.2 Hz, 1H), 4.50 (dt, J=4.6, 2.2 Hz, 1H), 3.85-3.79 (m, 2H), 3.72 (s, 3H), 3.71 (s, 3H). ¹³C NMR (151 MHz, CD₃CN) δ 170.36, 165.54, 163.13, 160.00 (d, J=6.6 Hz), 150.17, 145.95, 142.25, 136.62, 136.38 (d, J=2.1 Hz), 134.61, 132.42, 131.14 (d, J=1.9 Hz), 131.00, 130.56, 130.38, 129.92, 129.54, 129.07, 128.71, 128.07, 114.38 (d, J=4.8 Hz), 102.46, 90.73, 89.07, 81.73, 76.91, 75.08, 55.84 (d, J=2.5 Hz).

[chemical structure]

[1195] (3R,4S)-2-(3-benzoyl-5-iodo-2,4-dioxo-pyrimidin-1-yl)-4-[bis(4-methoxyphenyl)-phenyl-methoxy]tetrahydrofuran-3-yl]benzoate (325 mg, 382.06 mol) was dissolved in 2N ammonia in MeOH (5 mL) and stirred at room temperature for 24 hours. The solvent was evaporated and the residue was purified by flash chromatography (hexane/AcOEt, 20 to 80% AcOEt) to afford white solid 1-[(3R,4S)-4-[bis(4-methoxyphenyl)-phenyl-methoxy]-3-hydroxy-tetrahydrofuran-2-yl]-5-iodo-pyrimidine-2,4-dione (203 mg, 315.98 mol, 82.71% yield). ¹H NMR (600 MHz, CD₃CN) δ 9.07 (s, 1H), 7.66 (d, J=8.2 Hz, 1H), 7.43-7.38 (m, 2H), 7.29 (dt, J=8.8, 6.8 Hz, 6H), 7.28-7.20 (m, 1H), 6.89-6.83 (m, 4H), 5.51 (d, J=8.2 Hz, 1H), 5.45 (d, J=1.0 Hz, 1H), 4.09-4.02 (m, 1H), 3.85 (dd, J=9.9, 4.2 Hz, 1H), 3.77 (d, J=0.7 Hz, 6H), 3.75-3.71 (m, 1H), 3.53-3.47 (m, 2H). ¹³C NMR (151 MHz, CD₃CN) δ 164.23, 159.82 (d, J=2.7 Hz), 151.20, 146.06, 142.06, 137.03, 136.82, 130.94, 130.88, 128.96, 128.79, 127.91, 114.30 (d, J=5.4 Hz), 101.08, 93.16, 88.62, 79.55, 78.89, 75.82, 55.88.

[chemical structure]

### Example 4: Exemplary 4′-Modified TNA Analogs and Synthesis

### Base Modifications

[1196] Exemplary 4′-modified TNA analog

[chemical structure]

with various bases and base modifications are shown in Schemes 3A-3G.

[chemical structure]

[chemical structure]

[chemical structure]

[chemical structure]

[chemical structure]

[chemical structure]

[chemical structure]

### 4′-Methyl TNA

[1197] Exemplary 4′-(S)-Methyl TNA nucleotides and their syntheses are shown in Schemes 4A-4D.

[chemical structure]

[chemical structure]

[chemical structure]

[chemical structure]

[chemical structure]

[chemical structure]

[chemical structure]

[1198] Exemplary 4′-(R)-Methyl TNA nucleotides and their syntheses are shown in Schemes 5A-5D.

[chemical structure]

[chemical structure]

[chemical structure]

[chemical structure]

[chemical structure]

[chemical structure]

[chemical structure]

### 4′-Hydroxyalkyl or 4′-Alkoxyalkyl TNA

[1199] Exemplary 4′-(S)-Hydroxy methyl TNA nucleotides and their syntheses are shown in Schemes 6A-6B. Exemplary 4′-(R)-Hydroxy methyl TNA nucleotides and their syntheses are shown in Schemes 6C-6D.

[chemical structure]

[chemical structure]

[chemical structure]

[chemical structure]

[chemical structure]

[chemical structure]

[chemical structure]

[1200] Exemplary 4′-(S)-Methoxy methyl TNA nucleotides and their syntheses are shown in Schemes 7A-7B. Exemplary 4′-(R)-Methoxy methyl TNA nucleotides and their syntheses are shown in Schemes 7C-7D.

[chemical structure]

[chemical structure]

[chemical structure]

[chemical structure]

[chemical structure]

[chemical structure]

### 4′-Methoxy Ethoxy Methyl TNA

[1201] Exemplary 4′-(S)-Methoxy ethoxy methyl TNA nucleotides and their syntheses are shown in Schemes 8A-8B. Exemplary 4′-(R)-Methoxy ethoxy methyl TNA nucleotides and their syntheses are shown in Schemes 8C-8D.

[chemical structure]

[chemical structure]

[chemical structure]

[chemical structure]

[chemical structure]

[chemical structure]

### 4′-Fluoromethyl TNA

[1202] Exemplary 4′-(S)-Fluoromethyl TNA nucleotides and their syntheses are shown in Schemes 9A-9B. Exemplary 4′-(R)-Fluoromethyl TNA nucleotides and their syntheses are shown in Schemes 9C-9E.

[chemical structure]

[chemical structure]

[chemical structure]

[chemical structure]

[chemical structure]

[chemical structure]

[chemical structure]

[chemical structure]

[1203] Exemplary 4′-(S)-Trifluoromethyl TNA nucleotides and their syntheses are shown in Schemes 10A-10B. Exemplary 4′-(R)-Trifluoromethyl TNA nucleotides and their syntheses are shown in Schemes 10C-10E.

[chemical structure]

[chemical structure]

[chemical structure]

[chemical structure]

[chemical structure]

[chemical structure]

[chemical structure]

[chemical structure]

### 4′-Propargyl TNA

[1204] Exemplary 4′-(S)-Propargyl TNA nucleotides and their syntheses are shown in Schemes 11A-11B. Exemplary 4′-(R)-Propargyl TNA nucleotides and their syntheses are shown in Schemes 11C-11D.

[chemical structure]

[chemical structure]

[chemical structure]

[chemical structure]

[chemical structure]

[chemical structure]

[chemical structure]

[chemical structure]

### 4′-Triazoryl TNA

[1205] Exemplary 4′-(S)-Triazoryl (with substitutents) TNA nucleotides are shown in Schemes 12A-12B. Syntheses of exemplary 4′-(S)-Triazoryl (with substitutents) TNA nucleotides are shown in Schemes 12C-12D.

[chemical structure]

[chemical structure]

[chemical structure]

[chemical structure]

[chemical structure]

[chemical structure]

[chemical structure]

[chemical structure]

[1206] In Schemes 12C and 12D, R₁ can be.

[chemical structure]

[chemical structure]

[chemical structure]

[chemical structure]

[1207] Exemplary 4′-(R)-Propargyl TNA nucleotides are shown in Schemes 13A-13B. Syntheses of exemplary 4′-(R)-Triazoryl (with substitutents) TNA nucleotides are shown in Schemes 13C-13E.

[chemical structure]

[chemical structure]

[chemical structure]

[chemical structure]

[chemical structure]

[chemical structure]

[chemical structure]

[chemical structure]

[chemical structure]

[chemical structure]

[chemical structure]

[1208] In Schemes 13C-13E, R₁ can be:

[chemical structure]

[chemical structure]

[chemical structure]

[chemical structure]

### 4′-Amino methyl TNA

[1209] Exemplary 4′-(S)-Amino methyl (with substitutents) TNA nucleotides and their syntheses are shown in Schemes 14A-14B. Additional exemplary 4′-(S)-Amino methyl (with additional substitutents) TNA nucleotides are shown in Schemes 14C.

[chemical structure]

[chemical structure]

[chemical structure]

[chemical structure]

[1210] Exemplary 4′-(R)-Amino methyl (with substitutents) TNA nucleotides and their syntheses are shown in Schemes 15A-15B. Additional exemplary 4′-(R)-Amino methyl (with additional substitutents) TNA nucleotides are shown in Schemes 15C.

[chemical structure]

[chemical structure]

[chemical structure]

[chemical structure]

### 4′-gem methyl TNA

[1211] Exemplary 4′-gem methyl TNA nucleotides and their syntheses are shown in Schemes 16A-16B.

[chemical structure]

[chemical structure]

### Example 5: Exemplary TNA-Modified siRNA Duplex

[1212] Additional exemplary siRNA duplexes having TNA modification at position 1 of the antisense strand to target TTR and various extrahepatic targets are shown in the following tables.

TABLE 3
Exemplary TNA modified siRNA duplexes targeting mTTR

| | | | Single | | SEQ | |
|---|---|---|---|---|---|---|
| | Duplex | Sense/ | strand | | ID | |
| Target | ID | AS | ID | Sequences (5′-3′) | NO | Remark |
| mTTR | AD- | S | A- | AfsasCfaGfuGfuUfCfUfuGfcU | 55 | Control |
| | 57727 | | 117799 | fcUfaUfaAfL96 | | |
| | | AS | A- | usUfsaUfaGfaGfcAfagaAfcAfc | 56 | Duplex 1 |
| | | | 117800 | UfgUfususu | | |
| | | S | A- | AfsasCfaGfuGfuUfCfUfuGfcU | 57 | Control |
| | | | 117799 | fcUfaUfaAfL96 | | |
| | | AS | | PusUfsaUfaGfaGfcAfagaAfcAf | 58 | Duplex 2 |
| | | | | cUfgUfususu | | |
| | | S | A- | AfsasCfaGfuGfuUfCfUfuGfcU | 59 | TNA |
| | | | 117799 | fcUfaUfaAfL96 | | modified |
| | | AS | | (Tths)UfsaUfaGfaGfcAfagaAfc | 60 | Duplex 1 |
| | | | | AfcUfgUfususu | | |
| | | S | A- | AfsasCfaGfuGfuUfCfUfuGfcU | 61 | TNA |
| | | | 117799 | fcUfaUfaAfL96 | | modified |
| | | AS | | P(Tths)UfsaUfaGfaGfcAfagaAf | 62 | Duplex 2 |
| | | | | cAfcUfgUfususu | | |

TABLE 4
Exemplary TNA modified siRNA duplexes targeting TTR

| | | | Single | | | |
|---|---|---|---|---|---|---|
| | Duplex | Sense/ | strand | | SEQ | |
| Target | ID | AS | ID | Sequences (5′-3′) | ID NO | Remark |
| TTR | AD- | S | A- | asascaguGfuUfCfUfugcucuauaa | 63 | Control |
| | 286913 | | 12800 | L96 | | |
| | | | 9 | | | |
| | | AS | A- | VPusUfsauaGfagcaagaAfcAfcug | 64 | Duplex 1 |
| | | | 55571 | uususu | | |
| | | | 3 | | | |
| | | S | A- | asascaguGfuUfCfUfugcucuauaa | 65 | Control |
| | | | 128009 | L96 | | |
| | | AS | | PusUfsauaGfagcaagaAfcAfcugu | 66 | Duplex 2 |
| | | | | ususu | | |
| | | S | A- | asascaguGfuUfCfUfugcucuauaa | 67 | |
| | | | 128009 | L96 | | |
| | | AS | | (Tths)UfsauaGfagcaagaAfcAfcu | 68 | TNA |
| | | | | guususu | | modified |
| | | | | | | Duplex 1 |
| | | S | A- | asascaguGfuUfCfUfugcucuauaa | 69 | TNA |
| | | | 128009 | L96 | | modified |
| | | AS | | P(Tths)UfsauaGfagcaagaAfcAfc | 70 | Duplex 2 |
| | | | | uguususu | | |

TABLE 5
Exemplary TNA modified siRNA duplexes targeting C5

| | | | Single | | SEQ | |
|---|---|---|---|---|---|---|
| | Duplex | Sense/ | strand | | ID | |
| Target | ID | AS | ID | Sequences (5′-3′) | NO | Remark |
| C5 | AD- | S | A- | UfsgsAfcAfaAfaUfAfAfcUfcAfc | 71 | Control |
| | 58641 | | 119322 | UfaUfaAfL96 | | Duplex 1 |
| | | AS | A- | usUfsaUfaGfuGfaGfuuaUfuUfuG | 72 | |
| | | | 119323 | fuCfasasu | | |
| | | S | A- | UfsgsAfcAfaAfaUfAfAfcUfcAfc | 73 | Control |
| | | | 119322 | UfaUfaAfL96 | | Duplex 2 |
| | | AS | | PusUfsaUfaGfuGfaGfuuaUfuUfu | 74 | |
| | | | | GfuCfasasu | | |
| | | S | A- | UfsgsAfcAfaAfaUfAfAfcUfcAfc | 75 | TNA |
| | | | 119322 | UfaUfaAfL96 | | modified |
| | | | | | | Duplex 1 |
| | | AS | | (Tths)UfsaUfaGfuGfaGfuuaUfuU | 76 | |
| | | | | fuGfuCfasasu | | |
| | | S | A- | UfsgsAfcAfaAfaUfAfAfcUfcAfc | 77 | TNA |
| | | | 119322 | UfaUfaAfL96 | | modified |
| | | | | | | Duplex 2 |
| | | AS | | P(Tths)UfsaUfaGfuGfaGfuuaUfu | 78 | |
| | | | | UfuGfuCfasasu | | |

TABLE 6
Exemplary TNA modified siRNA duplexes targeting B-Cat (CTNNB1)

| | | | Single | | SEQ | |
|---|---|---|---|---|---|---|
| | Duplex | Sense/ | strand | | ID | |
| Target | ID | AS | ID | Sequences (5′-3′) | NO | Remark |
| B-Cat | AD- | S | A- | UfsasCfuGfuUfgGfAfUfuGf | 79 | Control |
| (CTNNB1) | 64919 | | 129065 | aUfuCfgAfaAfL10 | | |
| | | AS | A- | VPusUfsuCfgAfaUfcAfaucC | 80 | Duplex 1 |
| | | | 129066 | faAfcAfgUfasgsc | | |
| | | S | A- | UfsasCfuGfuUfgGfAfUfuGfa | 81 | Control |
| | | | 129065 | UfuCfgAfaAfL10 | | |
| | | AS | | PusUfsuCfgAfaUfcAfaucCfa | 82 | Duplex 2 |
| | | | | AfcAfgUfasgsc | | |
| | | S | A- | UfsasCfuGfuUfgGfAfUfuGfa | 83 | TNA |
| | | | 129065 | UfuCfgAfaAfL10 | | modified |
| | | AS | | (Tths)UfsuCfgAfaUfcAfaucC | 84 | Duplex 1 |
| | | | | faAfcAfgUfasgsc | | |
| | | S | A- | UfsasCfuGfuUfgGfAfUfuGfa | 85 | TNA |
| | | | 129065 | UfuCfgAfaAfL10 | | modified |
| | | AS | | P(Tths)UfsuCfgAfaUfcAfauc | 86 | Duplex 2 |
| | | | | CfaAfcAfgUfasgsc | | |

TABLE 7
Exemplary TNA modified siRNA duplexes targeting B-Cat (CTNNB1)

| | | | Single | | SEQ | |
|---|---|---|---|---|---|---|
| | Duplex | Sense/ | strand | | ID | |
| Target | ID | AS | ID | Sequences (5′-3′) | NO | Remark |
| B-Cat | AD- | S | A- | usascug(Uhd)UfgGfAfUfugauu | 87 | Control |
| (CTNNB1) | 503801 | | 555737 | cgasasa | | |
| | | AS | A- | VPusUfsucgAfaUfCfaaucCfaAf | 88 | Duplex 1 |
| | | | 141361 | caguasgsc | | |
| | | S | A- | usascug(Uhd)UfgGfAfUfugau | 89 | Control |
| | | | 555737 | ucgasasa | | |
| | | AS | | PusUfsucgAfaUfCfaaucCfaAf | 90 | Duplex 2 |
| | | | | caguasgsc | | |
| | | S | A- | usascug(Uhd)UfgGfAfUfugau | 91 | TNA |
| | | | 555737 | ucgasasa | | modified |
| | | AS | | (Tths)UfsucgAfaUfCfaaucCfa | 92 | Duplex 1 |
| | | | | Afcaguasgsc | | |
| | | S | A- | usascug(Uhd)UfgGfAfUfugau | 93 | TNA |
| | | | 555737 | ucgasasa | | modified |
| | | AS | | P(Tths)UfsucgAfaUfCfaaucC | 94 | Duplex 2 |
| | | | | faAfcaguasgsc | | |

TABLE 8
Exemplary TNA modified siRNA duplexes targeting APO-B

| | | | Single | | SEQ | |
|---|---|---|---|---|---|---|
| | Duplex | Sense/ | strand | | ID | |
| Target | ID | AS | ID | Sequences (5′-3′) | NO | Remark |
| APO-B | AD- | S | A- | UfsgsUfgAfcAfaAfUfAfuGfg | 95 | Control |
| | 63716 | | 127772 | GfcAfuCfaAfL96 | | |
| | | AS | A- | usUfsgAfuGfcCfcAfuauUfuGf | 96 | Duplex 1 |
| | | | 127773 | uCfaCfasasa | | |
| | | S | A- | UfsgsUfgAfcAfaAfUfAfuGfg | 97 | Control |
| | | | 127772 | GfcAfuCfaAfL96 | | |
| | | AS | | PusUfsgAfuGfcCfcAfuauUfuG | 98 | Duplex 2 |
| | | | | fuCfaCfasasa | | |
| | | S | A- | UfsgsUfgAfcAfaAfUfAfuGfg | 99 | TNA |
| | | | 127772 | GfcAfuCfaAfL96 | | modified |
| | | AS | | (Tths)UfsgAfuGfcCfcAfuauUf | 100 | Duplex 1 |
| | | | | uGfuCfaCfasasa | | |
| | | S | A- | UfsgsUfgAfcAfaAfUfAfuGfg | 101 | TNA |
| | | | 127772 | GfcAfuCfaAfL96 | | modified |
| | | AS | | P(Tths)UfsgAfuGfcCfcAfuauU | 102 | Duplex 2 |
| | | | | fuGfuCfaCfasasa | | |

TABLE 9
Exemplary TNA modified siRNA duplexes targeting SOD1

| | | | Single | | SEQ | |
|---|---|---|---|---|---|---|
| | Duplex | Sense/ | strand | | ID | |
| Target | ID | AS | ID | Sequences (5′-3′) | NO | Remark |
| SOD1 | AD- | S | A- | csasuuu(Uhd)AfaUfCfCfucacu | 103 | Control |
| | 401824 | | 637448 | cuasasa | | |
| | | AS | A- | VPusUfsuagAfgUfGfaggaUfu | 104 | Duplex 1 |
| | | | 444402 | Afaaaugsasg | | |
| | | S | A- | csasuuu(Uhd)AfaUfCfCfucacu | 105 | Control |
| | | | 637448 | cuasasa | | |
| | | AS | | PusUfsuagAfgUfGfaggaUfuAf | 106 | Duplex 2 |
| | | | | aaaugsasg | | |
| | | S | A- | csasuuu(Uhd)AfaUfCfCfucacu | 107 | TNA |
| | | | 637448 | cuasasa | | modified |
| | | AS | | (Tths)UfsuagAfgUfGfaggaUfu | 108 | Duplex 1 |
| | | | | Afaaaugsasg | | |
| | | S | A- | csasuuu(Uhd)AfaUfCfCfucacu | 109 | TNA |
| | | | 637448 | cuasasa | | modified |
| | | AS | | P(Tths)UfsuagAfgUfGfaggaUf | 110 | Duplex 2 |
| | | | | uAfaaaugsasg | | |

TABLE 10
Exemplary TNA modified siRNA duplexes targeting hTTRsc02 h/c TTR

| | | | Single | | SEQ | |
|---|---|---|---|---|---|---|
| | Duplex | Sense/ | strand | | ID | |
| Target | ID | AS | ID | Sequences (5′-3′) | NO | Remark |
| hTTRsc02 | AD- | S | A- | usgsggauUfuCfAfUfguaaccaa | 111 | Control |
| h/c TTR | 70500 | | 140611 | gaL10 | | |
| | | AS | A- | VPusCfsuugGfuuAfcaugAfaA | 112 | Duplex 1 |
| | | | 131902 | fucccasusc | | |
| | | S | A- | usgsggauUfuCfAfUfguaaccaa | 113 | Control |
| | | | 140611 | gaL10 | | |
| | | AS | | PusCfsuugGfuuAfcaugAfaAf | 114 | Duplex 2 |
| | | | | ucccasusc | | |
| | | S | A- | usgsggauUfuCfAfUfguaaccaa | 115 | TNA |
| | | | 140611 | gaL10 | | modified |
| | | AS | | (Tths)CfsuugGfuuAfcaugAfa | 116 | Duplex 1 |
| | | | | Afucccasusc | | |
| | | S | A- | usgsggauUfuCfAfUfguaaccaa | 117 | TNA |
| | | | 140611 | gaL10 | | modified |
| | | AS | | P(Tths)CfsuugGfuuAfcaugAf | 118 | Duplex 2 |
| | | | | aAfucccasusc | | |

TABLE 11
Exemplary TNA modified siRNA duplexes targeting oc-mTTR

| | | | Single | | SEQ | |
|---|---|---|---|---|---|---|
| | Duplex | Sense/ | strand | | ID | |
| Target | ID | AS | ID | Sequences (5′-3′) | NO | Remark |
| oc- | AD- | S | A-594427 | asascag(Uhd)GfuUfCfUfugcucu | 119 | Control |
| mTTR | 579804 | | | ausasa | | |
| | | AS | A-555713 | VPusUfsauaGfagcaagaAfcAfcug | 120 | Duplex 1 |
| | | | | uususu | | |
| | | S | A- | asascag(Uhd)GfuUfCfUfugcuc | 121 | Control |
| | | | 594427 | uausasa | | |
| | | AS | | PusUfsauaGfagcaagaAfcAfcu | 122 | Duplex 2 |
| | | | | guususu | | |
| | | S | A- | asascag(Uhd)GfuUfCfUfugcuc | 123 | TNA |
| | | | 594427 | uausasa | | modified |
| | | AS | | (Tths)UfsauaGfagcaagaAfcAf | 124 | Duplex 1 |
| | | | | cuguususu | | |
| | | S | A- | asascag(Uhd)GfuUfCfUfugcuc | 125 | TNA |
| | | | 594427 | uausasa | | modified |
| | | AS | | P(Tths)UfsauaGfagcaagaAfcA | 126 | Duplex 2 |
| | | | | fcuguususu | | |

TABLE 12
Exemplary TNA modified siRNA duplexes targeting Mstn

| | | | Single | | SEQ | |
|---|---|---|---|---|---|---|
| | Duplex | Sense/ | strand | | ID | |
| Target | ID | AS | ID | Sequences (5′-3′) | NO | Remark |
| Mstn | AD- | S | A-135660 | asusggcaAfaGfAfAfcaaauaauaaL | 127 | Control |
| | 68688 | | | 10 | | |
| | | AS | A-135658 | usUfsauuAfuUfUfguucUfuUfgcca | 128 | Duplex 1 |
| | | | | ususa | | |
| | | S | A- | asusggcaAfaGfAfAfcaaauaaua | 129 | Control |
| | | | 135660 | aL10 | | Duplex 2 |
| | | AS | | PusUfsauuAfuUfUfguucUfuUf | 130 | |
| | | | | gccaususa | | |
| | | S | A- | asusggcaAfaGfAfAfcaaauaaua | 131 | TNA |
| | | | 135660 | aL10 | | modified |
| | | AS | | (Tths)UfsauuAfuUfUfguucUfu | 132 | Duplex 1 |
| | | | | Ufgccaususa | | |
| | | S | A- | asusggcaAfaGfAfAfcaaauaaua | 133 | TNA |
| | | | 135660 | aL10 | | modified |
| | | AS | | P(Tths)UfsauuAfuUfUfguucUf | 134 | Duplex 2 |
| | | | | uUfgccaususa | | |

### Example 6: In Vitro Activity of siRNA Duplexes Modified by 4′-Me TNA-Positional Effect and Chiral Effect

[1213] The impact of the single 4′-modified TNA nucleotide incorporations on the in vitro siRNA activity was evaluated in this example. The TNA used herein is a 4′-Me TNA

[chemical structure]

synthesized according to Schemes 4A-4D in Example 4. Pure (R) and (S) isomers were synthesized and used to make the corresponding phosphoramidites, controlled-pore glass (CPG), and triphosphates. The positional effect of single incorporation of the 4′-Me TNA along the length of each of the sense strand and antisense strand as well as the impact of the chiral configuration of the 4′-Me TNA were analysis with respect to the in vitro siRNA activity.

[1214] Primary mouse hepatocytes (PMH) were cultured in Williams E Medium with 10% fetal bovine serum. Transfection of cells using RNAiMAX reagent was done as per the manufacturer's recommended protocol. Thus, cells were thawed immediately prior to transfection and then plated onto 384-well plates with a seed density of ~5000 cells/well. Pre-incubated lipid/siRNA complex (0.1 μL RNAiMax, siRNA, in 5 μL Opti-MEM for 15 min) was added to a 384-well collagen-coated plate (BioCoat; Corning) and cells were incubated for 20 hours at 37° C. in an atmosphere of 5% CO₂. Eight 6-fold serial dilutions ranging from 10 to 0.036 nM were used to perform dose response experiments. Media was removed before washing and lysing the cells. Using Dynabeads mRNA isolation kit according to manufacturer's protocol, RNA was extracted and subsequently reverse-transcribed with the ABI high capacity cDNA reverse transcription kit. Quantification was done by real-time PCR, whereby the cDNA (2 μL) was added to a master mix that contained 0.5 μL mouse Gapdh TaqMan Probe, 0.5 μL Ttr TaqMan probes, and 5 μL Lightcycler 480 probe master mix per well in a 384-well 50 plate. Real-time PCR was accomplished in an ABI 7900HT RT-PCR system using the ΔΔCt (RQ) assay. Each duplex and concentration was tested in four biological replicates. To calculate relative fold change, real time data were analyzed using the AACt method and normalized to assays performed with cells transfected with 10 nM nonspecific siRNA. IC50 values were calculated using a 4-parameter fit model using XLFit.

[1215] The results for IC 50 values of the siRNA duplexes targeting mTTR, containing the 4′-modified TNA at various positions of the sense strand, as compared to patent AD-57727 (see the sequence in Table 3), are shown in Table 13 and FIG. 4 (S configuration for the 4′-modified TNA), and Table 14 and FIG. 5 (R configuration for the 4′-modified TNA), respectively. The results for IC 50 values of the siRNA duplexes targeting mTTR, containing the 4′-modified TNA at various positions of the antisense strand, as compared to patent AD-57727 (see the sequence in Table 3), are shown in Table 15 and FIG. 6 (S configuration for the 4′-modified TNA), and Table 16 and FIG. 7 (R configuration for the 4′-modified TNA), respectively.

TABLE 13
IC50 data for siRNA duplexes containing 4′-modified
TNA at various positions of the sense strand (S configuration
for the 4′-modified TNA)

| Duplex ID | S-configuration | IC₅₀ (nM) | SD (IC₅₀) |
|---|---|---|---|
| AD-57727.193 | Parent | 0.022 | 0.0072 |
| AD-674039.1 | S1 | 0.027 | 0.0109 |
| AD-674040.1 | S2 | 0.023 | 0.0067 |
| AD-674041.1 | S3 | 0.013 | 0.0050 |
| AD-674042.1 | S4 | 0.025 | 0.0142 |
| AD-674043.1 | S5 | 0.027 | 0.0359 |
| AD-674044.1 | S6 | 0.061 | 0.0733 |
| AD-674045.1 | S7 | 0.024 | 0.0132 |
| AD-674046.1 | S8 | 0.084 | 0.0119 |
| AD-674047.1 | S9 | 0.075 | 0.0692 |
| AD-674048.1 | S10 | 0.208 | 0.1848 |
| AD-674049.1 | S11 | N/A | N/A |
| AD-674050.1 | S12 | 0.031 | 0.0301 |
| AD-674051.1 | S13 | 0.029 | 0.0084 |
| AD-674052.1 | S14 | 0.026 | 0.0270 |
| AD-674053.1 | S15 | 0.066 | 0.0204 |
| AD-674054.1 | S16 | 0.43 | 0.2479 |
| AD-674055.1 | S17 | 0.778 | 0.3998 |
| AD-674056.1 | S18 | 0.763 | 1.2915 |
| AD-674057.1 | S19 | 1.17 | 0.1144 |
| AD-674058.1 | S20 | 0.234 | 1.0032 |
| AD-674059.1 | S21 | 0.175 | 0.1020 |

TABLE 13A
Sequence information for siRNA duplexes in Table 13

| Duplex | | SEQ ID | | SEQ ID |
|---|---|---|---|---|
| Name | Sense Oligo | NO. | Antisense Oligo | NO. |
| AD- | Y123sasCfaGfuGfuUfCfUfuGfc | 135 | usUfsaUfaGfaGfcAfagaAfc | 56 |
| 674039.1 | UfcUfaUfaAfL96 | | AfcUfgUfususu | |
| AD- | AfsY123sCfaGfuGfuUfCfUfuGf | 136 | usUfsaUfaGfaGfcAfagaAfc | 56 |
| 674040.1 | cUfcUfaUfaAfL96 | | AfcUfgUfususu | |
| AD- | AfsasY125aGfuGfuUfCfUfuGfc | 137 | usUfsaUfaGfaGfcAfagaAfc | 56 |
| 674041.1 | UfcUfaUfaAfL96 | | AfcUfgUfususu | |
| AD- | AfsasCfY123GfuGfuUfCfUfuGf | 138 | usUfsaUfaGfaGfcAfagaAfc | 56 |
| 674042.1 | cUfcUfaUfaAfL96 | | AfcUfgUfususu | |
| AD- | AfsasCfaY124uGfuUfCfUfuGfc | 139 | usUfsaUfaGfaGfcAfagaAfc | 56 |
| 674043.1 | UfcUfaUfaAfL96 | | AfcUfgUfususu | |
| AD- | AfsasCfaGfY126GfuUfCfUfuGfc | 140 | usUfsaUfaGfaGfcAfagaAfc | 56 |
| 674044.1 | UfcUfaUfaAfL96 | | AfcUfgUfususu | |
| AD- | AfsasCfaGfuY124uUfCfUfuGfc | 141 | usUfsaUfaGfaGfcAfagaAfc | 56 |
| 674045.1 | UfcUfaUfaAfL96 | | AfcUfgUfususu | |
| AD- | AfsasCfaGfuGfY126UfCfUfuGfc | 142 | usUfsaUfaGfaGfcAfagaAfc | 56 |
| 674046.1 | UfcUfaUfaAfL96 | | AfcUfgUfususu | |
| AD- | AfsasCfaGfuGfuY126CfUfuGfc | 143 | usUfsaUfaGfaGfcAfagaAfc | 56 |
| 674047.1 | UfcUfaUfaAfL96 | | AfcUfgUfususu | |
| AD- | AfsasCfaGfuGfuUfY125UfuGfc | 144 | usUfsaUfaGfaGfcAfagaAfc | 56 |
| 674048.1 | UfcUfaUfaAfL96 | | AfcUfgUfususu | |
| AD- | AfsasCfaGfuGfuUfCfY126uGfc | 145 | usUfsaUfaGfaGfcAfagaAfc | 56 |
| 674049.1 | UfcUfaUfaAfL96 | | AfcUfgUfususu | |
| AD- | AfsasCfaGfuGfuUfCfUfY126Gfc | 146 | usUfsaUfaGfaGfcAfagaAfc | 56 |
| 674050.1 | UfcUfaUfaAfL96 | | AfcUfgUfususu | |
| AD- | AfsasCfaGfuGfuUfCfUfuY124c | 147 | usUfsaUfaGfaGfcAfagaAfc | 56 |
| 674051.1 | UfcUfaUfaAfL96 | | AfcUfgUfususu | |
| AD- | AfsasCfaGfuGfuUfCfUfuGfY12 | 148 | usUfsaUfaGfaGfcAfagaAfc | 56 |
| 674052.1 | 5UfcUfaUfaAfL96 | | AfcUfgUfususu | |
| AD- | AfsasCfaGfuGfuUfCfUfuGfcY12 | 149 | usUfsaUfaGfaGfcAfagaAfc | 56 |
| 674053.1 | 6cUfaUfaAfL96 | | AfcUfgUfususu | |
| AD- | AfsasCfaGfuGfuUfCfUfuGfcUf | 150 | usUfsaUfaGfaGfcAfagaAfc | 56 |
| 674054.1 | Y125UfaUfaAfL96 | | AfcUfgUfususu | |
| AD- | AfsasCfaGfuGfuUfCfUfuGfcUfc | 151 | usUfsaUfaGfaGfcAfagaAfc | 56 |
| 674055.1 | Y126aUfaAfL96 | | AfcUfgUfususu | |
| AD- | AfsasCfaGfuGfuUfCfUfuGfcUfc | 152 | usUfsaUfaGfaGfcAfagaAfc | 56 |
| 674056.1 | UfY123UfaAfL96 | | AfcUfgUfususu | |
| AD- | AfsasCfaGfuGfuUfCfUfuGfcUfc | 153 | usUfsaUfaGfaGfcAfagaAfc | 56 |
| 674057.1 | UfaY126aAfL96 | | AfcUfgUfususu | |
| AD- | AfsasCfaGfuGfuUfCfUfuGfcUfc | 154 | usUfsaUfaGfaGfcAfagaAfc | 56 |
| 674058.1 | UfaUfY123AfL96 | | AfcUfgUfususu | |
| AD- | AfsasCfaGfuGfuUfCfUfuGfcUfc | 155 | usUfsaUfaGfaGfcAfagaAfc | 56 |
| 674059.1 | UfaUfaY123L96 | | AfcUfgUfususu | |

TABLE 14
IC50 data for siRNA duplexes containing 4′-modified
TNA at various positions of the sense strand (R configuration
for the 4′-modified TNA)

| Duplex ID | R-configuration | IC₅₀ (nM) | SD (IC₅₀) |
|---|---|---|---|
| AD-57727.193 | Parent | 0.022 | 0.0072 |
| AD-674083.1 | S1 | 0.001 | 0.0008 |
| AD-674084.1 | S2 | 0.000 | 0.0000 |
| AD-674085.1 | S3 | 0.001 | 0.0007 |
| AD-674086.1 | S4 | 0.002 | 0.0010 |
| AD-674087.1 | S5 | 0.002 | 0.0011 |
| AD-674088.1 | S6 | 0.005 | 0.0013 |
| AD-674089.1 | S7 | 0.003 | 0.0016 |
| AD-674090.1 | S8 | 0.032 | 0.0012 |
| AD-674091.1 | S9 | 0.005 | 0.0048 |
| AD-674092.1 | S10 | 0.071 | 0.0831 |
| AD-674093.1 | S11 | 0.111 | 0.1731 |
| AD-674094.1 | S12 | 0.053 | 0.1501 |
| AD-674095.1 | S13 | 0.009 | 0.0041 |
| AD-674096.1 | S14 | 0.011 | 0.0071 |
| AD-674097.1 | S15 | 0.014 | 0.0309 |
| AD-674098.1 | S16 | 0.000 | 0.0000 |
| AD-674099.1 | S17 | 0.003 | 0.0038 |
| AD-674100.1 | S18 | 0.009 | 0.0136 |
| AD-674101.1 | S19 | 0.003 | 0.0039 |
| AD-674102.1 | S20 | 0.001 | 0.0012 |
| AD-674103.1 | S21 | 0.013 | 0.0178 |

TABLE 14A
Sequence information for siRNA duplexes in Table 14

| Duplex | | SEQ ID | | SEQ ID |
|---|---|---|---|---|
| Name | Sense Oligo | NO. | Antisense Oligo | NO. |
| AD- | Y119sasCfaGfuGfuUfCfUfuGfc | 156 | usUfsaUfaGfaGfcAfagaAfc | 56 |
| 674083.1 | UfcUfaUfaAfL96 | | AfcUfgUfususu | |
| AD- | AfsY119sCfaGfuGfuUfCfUfuGf | 157 | usUfsaUfaGfaGfcAfagaAfc | 56 |
| 674084.1 | cUfcUfaUfaAfL96 | | AfcUfgUfususu | |
| AD- | AfsasY121aGfuGfuUfCfUfuGfc | 158 | usUfsaUfaGfaGfcAfagaAfc | 56 |
| 674085.1 | UfcUfaUfaAfL96 | | AfcUfgUfususu | |
| AD- | AfsasCfY119GfuGfuUfCfUfuGf | 159 | usUfsaUfaGfaGfcAfagaAfc | 56 |
| 674086.1 | cUfcUfaUfaAfL96 | | AfcUfgUfususu | |
| AD- | AfsasCfaY120uGfuUfCfUfuGfc | 160 | usUfsaUfaGfaGfcAfagaAfc | 56 |
| 674087.1 | UfcUfaUfaAfL96 | | AfcUfgUfususu | |
| AD- | AfsasCfaGfY122GfuUfCfUfuGfc | 161 | usUfsaUfaGfaGfcAfagaAfc | 56 |
| 674088.1 | UfcUfaUfaAfL96 | | AfcUfgUfususu | |
| AD- | AfsasCfaGfuY120uUfCfUfuGfc | 162 | usUfsaUfaGfaGfcAfagaAfc | 56 |
| 674089.1 | UfcUfaUfaAfL96 | | AfcUfgUfususu | |
| AD- | AfsasCfaGfuGfY122UfCfUfuGfc | 163 | usUfsaUfaGfaGfcAfagaAfc | 56 |
| 674090.1 | UfcUfaUfaAfL96 | | AfcUfgUfususu | |
| AD- | AfsasCfaGfuGfuY122CfUfuGfc | 164 | usUfsaUfaGfaGfcAfagaAfc | 56 |
| 674091.1 | UfcUfaUfaAfL96 | | AfcUfgUfususu | |
| AD- | AfsasCfaGfuGfuUfY121UfuGfc | 165 | usUfsaUfaGfaGfcAfagaAfc | 56 |
| 674092.1 | UfcUfaUfaAfL96 | | AfcUfgUfususu | |
| AD- | AfsasCfaGfuGfuUfCfY122uGfc | 166 | usUfsaUfaGfaGfcAfagaAfc | 56 |
| 674093.1 | UfcUfaUfaAfL96 | | AfcUfgUfususu | |
| AD- | AfsasCfaGfuGfuUfCfUfY122Gfc | 167 | usUfsaUfaGfaGfcAfagaAfc | 56 |
| 674094.1 | UfcUfaUfaAfL96 | | AfcUfgUfususu | |
| AD- | AfsasCfaGfuGfuUfCfUfuY120c | 168 | usUfsaUfaGfaGfcAfagaAfc | 56 |
| 674095.1 | UfcUfaUfaAfL96 | | AfcUfgUfususu | |
| AD- | AfsasCfaGfuGfuUfCfUfuGfY12 | 169 | usUfsaUfaGfaGfcAfagaAfc | 56 |
| 674096.1 | 1UfcUfaUfaAfL96 | | AfcUfgUfususu | |
| AD- | AfsasCfaGfuGfuUfCfUfuGfcY12 | 170 | usUfsaUfaGfaGfcAfagaAfc | 56 |
| 674097.1 | 2cUfaUfaAfL96 | | AfcUfgUfususu | |
| AD- | AfsasCfaGfuGfuUfCfUfuGfcUf | 171 | usUfsaUfaGfaGfcAfagaAfc | 56 |
| 674098.1 | Y121UfaUfaAfL96 | | AfcUfgUfususu | |
| AD- | AfsasCfaGfuGfuUfCfUfuGfcUfc | 172 | usUfsaUfaGfaGfcAfagaAfc | 56 |
| 674099.1 | Y122aUfaAfL96 | | AfcUfgUfususu | |
| AD- | AfsasCfaGfuGfuUfCfUfuGfcUfc | 173 | usUfsaUfaGfaGfcAfagaAfc | 56 |
| 674100.1 | UfY119UfaAfL96 | | AfcUfgUfususu | |
| AD- | AfsasCfaGfuGfuUfCfUfuGfcUfc | 174 | usUfsaUfaGfaGfcAfagaAfc | 56 |
| 674101.1 | UfaY122aAfL96 | | AfcUfgUfususu | |
| AD- | AfsasCfaGfuGfuUfCfUfuGfcUfc | 175 | usUfsaUfaGfaGfcAfagaAfc | 56 |
| 674102.1 | UfaUfY119AfL96 | | AfcUfgUfususu | |
| AD- | AfsasCfaGfuGfuUfCfUfuGfcUfc | 176 | usUfsaUfaGfaGfcAfagaAfc | 56 |
| 674103.1 | UfaUfaY119L96 | | AfcUfgUfususu | |

TABLE 15
IC50 data for siRNA duplexes containing 4′-modified
TNA at various positions of the antisense strand (S
configuration for the 4′-modified TNA)

| Duplex ID | S-configuration | IC₅₀ (nM) | SD (IC₅₀) |
|---|---|---|---|
| AD-57727.193 | Parent | 0.022 | 0.0072 |
| AD-674060.1 | AS1 | 0.387 | 0.3680 |
| AD-674061.1 | AS2 | 3.294 | 5.7696 |
| AD-674062.1 | AS3 | 0.048 | 0.0176 |
| AD-674063.1 | AS4 | 0.214 | 0.0715 |
| AD-674064.1 | AS5 | 0.026 | 0.0180 |
| AD-674065.1 | AS6 | 0.026 | 0.0064 |
| AD-674066.1 | AS7 | 0.023 | 0.0060 |
| AD-674067.1 | AS8 | 0.057 | 0.0739 |
| AD-674068.1 | AS9 | 0.034 | 0.0095 |
| AD-674069.1 | AS10 | 0.027 | 0.0090 |
| AD-674070.1 | AS11 | 0.034 | 0.0535 |
| AD-674071.1 | AS12 | 0.168 | 0.0640 |
| AD-674072.1 | AS13 | 0.119 | 0.0414 |
| AD-674073.1 | AS14 | 0.072 | 0.1474 |
| AD-674074.1 | AS15 | 0.701 | 0.0181 |
| AD-674075.1 | AS16 | 0.042 | 0.0510 |
| AD-674076.1 | AS17 | 0.115 | 0.1850 |
| AD-674077.1 | AS18 | 0.091 | 0.0177 |
| AD-674078.1 | AS19 | 0.253 | 0.0597 |
| AD-674079.1 | AS20 | 0.094 | 0.0236 |
| AD-674080.1 | AS21 | 0.066 | 0.0108 |
| AD-674081.1 | AS22 | 0.116 | 0.0930 |
| AD-674082.1 | AS23 | 0.155 | 0.0512 |

TABLE 15A
Sequence information for siRNA duplexes in Table 15

| Duplex | | SEQ ID | | SEQ ID |
|---|---|---|---|---|
| Name | Sense Oligo | NO. | Antisense Oligo | NO. |
| AD- | AfsasCfaGfuGfuUfCfUfuGfc | 55 | Y126sUfsaUfaGfaGfcAfagaAf | 177 |
| 674060.1 | UfcUfaUfaAfL96 | | cAfcUfgUfususu | |
| AD- | AfsasCfaGfuGfuUfCfUfuGfc | 55 | usY126saUfaGfaGfcAfagaAfc | 178 |
| 674061.1 | UfcUfaUfaAfL96 | | AfcUfgUfususu | |
| AD- | AfsasCfaGfuGfuUfCfUfuGfc | 55 | usUfsY123UfaGfaGfcAfagaAf | 179 |
| 674062.1 | UfcUfaUfaAfL96 | | cAfcUfgUfususu | |
| AD- | AfsasCfaGfuGfuUfCfUfuGfc | 55 | usUfsaY126aGfaGfcAfagaAfc | 180 |
| 674063.1 | UfcUfaUfaAfL96 | | AfcUfgUfususu | |
| AD- | AfsasCfaGfuGfuUfCfUfuGfc | 55 | usUfsaUfY123GfaGfcAfagaAf | 181 |
| 674064.1 | UfcUfaUfaAfL96 | | cAfcUfgUfususu | |
| AD- | AfsasCfaGfuGfuUfCfUfuGfc | 55 | usUfsaUfaY124aGfcAfagaAfc | 182 |
| 674065.1 | UfcUfaUfaAfL96 | | AfcUfgUfususu | |
| AD- | AfsasCfaGfuGfuUfCfUfuGfc | 55 | usUfsaUfaGfY123GfcAfagaAf | 183 |
| 674066.1 | UfcUfaUfaAfL96 | | cAfcUfgUfususu | |
| AD- | AfsasCfaGfuGfuUfCfUfuGfc | 55 | usUfsaUfaGfaY124cAfagaAfc | 184 |
| 674067.1 | UfcUfaUfaAfL96 | | AfcUfgUfususu | |
| AD- | AfsasCfaGfuGfuUfCfUfuGfc | 55 | usUfsaUfaGfaGfY125AfagaAf | 185 |
| 674068.1 | UfcUfaUfaAfL96 | | cAfcUfgUfususu | |
| AD- | AfsasCfaGfuGfuUfCfUfuGfc | 55 | usUfsaUfaGfaGfcY123agaAfc | 186 |
| 674069.1 | UfcUfaUfaAfL96 | | AfcUfgUfususu | |
| AD- | AfsasCfaGfuGfuUfCfUfuGfc | 55 | usUfsaUfaGfaGfcAfY123gaAf | 187 |
| 674070.1 | UfcUfaUfaAfL96 | | cAfcUfgUfususu | |
| AD- | AfsasCfaGfuGfuUfCfUfuGfc | 55 | usUfsaUfaGfaGfcAfaY124aAf | 188 |
| 674071.1 | UfcUfaUfaAfL96 | | cAfcUfgUfususu | |
| AD- | AfsasCfaGfuGfuUfCfUfuGfc | 55 | usUfsaUfaGfaGfcAfagY123Af | 189 |
| 674072.1 | UfcUfaUfaAfL96 | | cAfcUfgUfususu | |
| AD- | AfsasCfaGfuGfuUfCfUfuGfc | 55 | usUfsaUfaGfaGfcAfagaY123c | 190 |
| 674073.1 | UfcUfaUfaAfL96 | | AfcUfgUfususu | |
| AD- | AfsasCfaGfuGfuUfCfUfuGfc | 55 | usUfsaUfaGfaGfcAfagaAfY12 | 191 |
| 674074.1 | UfcUfaUfaAfL96 | | 5AfcUfgUfususu | |
| AD- | AfsasCfaGfuGfuUfCfUfuGfc | 55 | usUfsaUfaGfaGfcAfagaAfcY1 | 192 |
| 674075.1 | UfcUfaUfaAfL96 | | 23cUfgUfususu | |
| AD- | AfsasCfaGfuGfuUfCfUfuGfc | 55 | usUfsaUfaGfaGfcAfagaAfcAf | 193 |
| 674076.1 | UfcUfaUfaAfL96 | | Y125UfgUfususu | |
| AD- | AfsasCfaGfuGfuUfCfUfuGfc | 55 | usUfsaUfaGfaGfcAfagaAfcAf | 194 |
| 674077.1 | UfcUfaUfaAfL96 | | cY126gUfususu | |
| AD- | AfsasCfaGfuGfuUfCfUfuGfc | 55 | usUfsaUfaGfaGfcAfagaAfcAf | 195 |
| 674078.1 | UfcUfaUfaAfL96 | | cUfY124Ufususu | |
| AD- | AfsasCfaGfuGfuUfCfUfuGfc | 55 | usUfsaUfaGfaGfcAfagaAfcAf | 196 |
| 674079.1 | UfcUfaUfaAfL96 | | cUfgY126ususu | |
| AD- | AfsasCfaGfuGfuUfCfUfuGfc | 55 | usUfsaUfaGfaGfcAfagaAfcAf | 197 |
| 674080.1 | UfcUfaUfaAfL96 | | cUfgUfY126susu | |
| AD- | AfsasCfaGfuGfuUfCfUfuGfc | 55 | usUfsaUfaGfaGfcAfagaAfcAf | 198 |
| 674081.1 | UfcUfaUfaAfL96 | | cUfgUfusY126su | |
| AD- | AfsasCfaGfuGfuUfCfUfuGfc | 55 | usUfsaUfaGfaGfcAfagaAfcAf | 199 |
| 674082.1 | UfcUfaUfaAfL96 | | cUfgUfususY126 | |

TABLE 16
IC50 data for siRNA duplexes containing 4′-modified
TNA at various positions of the antisense strand (R
configuration for the 4′-modified TNA)

| Duplex ID | R-configuration | IC₅₀ (nM) | SD (IC₅₀) |
|---|---|---|---|
| Parent | AD-57727.193 | 0.022 | 0.0072 |
| AD-674104.1 | AS1 | 0.194 | 0.3757 |
| AD-674105.1 | AS2 | 0.0964 | 0.0943 |
| AD-674106.1 | AS3 | 0.0053 | 0.0031 |
| AD-674107.1 | AS4 | 0.0156 | 0.0116 |
| AD-674108.1 | AS5 | 0.0040 | 0.0058 |
| AD-674109.1 | AS6 | 0.0006 | 0.0001 |
| AD-674110.1 | AS7 | 0.0081 | 0.0088 |
| AD-674111.1 | AS8 | 0.0125 | 0.0082 |
| AD-674112.1 | AS9 | 0.0276 | 0.0224 |
| AD-674113.1 | AS10 | 0.0070 | 0.0012 |
| AD-674114.1 | AS11 | 2.135 | 2.688 |
| AD-674115.1 | AS12 | 33.173 | 57.028 |
| AD-674116.1 | AS13 | 1.609 | 0.610 |
| AD-674117.1 | AS14 | 11.580 | 14.170 |
| AD-674118.1 | AS15 | N/A | N/A |
| AD-674119.1 | AS16 | 1.096 | 0.836 |
| AD-674120.1 | AS17 | 1.948 | 1.097 |
| AD-674121.1 | AS18 | 0.846 | 0.525 |
| AD-674122.1 | AS19 | 0.035 | 0.051 |
| AD-674123.1 | AS20 | 0.037 | 0.027 |
| AD-674124.1 | AS21 | 0.066 | 0.064 |
| AD-674125.1 | AS22 | 0.148 | 0.126 |
| AD-674126.1 | AS23 | 0.043 | 0.042 |

TABLE 16A
Sequence information for siRNA duplexes in Table 16

| Duplex | | | | |
|---|---|---|---|---|
| Name | Sense Oligo | SEQ ID NO. | Antisense Oligo | SEQ ID NO. |
| AD- | AfsasCfaGfuGfuUfCfUfuGfc | 55 | Y122sUfsaUfaGfaGfcAfagaAf | 200 |
| 674104.1 | UfcUfaUfaAfL96 | | cAfcUfgUfususu | |
| AD- | AfsasCfaGfuGfuUfCfUfuGfc | 55 | usY122saUfaGfaGfcAfagaAfc | 201 |
| 674105.1 | UfcUfaUfaAfL96 | | AfcUfgUfususu | |
| AD- | AfsasCfaGfuGfuUfCfUfuGfc | 55 | usUfsY119UfaGfaGfcAfagaAf | 202 |
| 674106.1 | UfcUfaUfaAfL96 | | cAfcUfgUfususu | |
| AD- | AfsasCfaGfuGfuUfCfUfuGfc | 55 | usUfsaY122aGfaGfcAfagaAfc | 203 |
| 674107.1 | UfcUfaUfaAfL96 | | AfcUfgUfususu | |
| AD- | AfsasCfaGfuGfuUfCfUfuGfc | 55 | usUfsaUfY119GfaGfcAfagaAf | 204 |
| 674108.1 | UfcUfaUfaAfL96 | | cAfcUfgUfususu | |
| AD- | AfsasCfaGfuGfuUfCfUfuGfc | 55 | usUfsaUfaY120aGfcAfagaAfc | 205 |
| 674109.1 | UfcUfaUfaAfL96 | | AfcUfgUfususu | |
| AD- | AfsasCfaGfuGfuUfCfUfuGfc | 55 | usUfsaUfaGfY119GfcAfagaAf | 206 |
| 674110.1 | UfcUfaUfaAfL96 | | cAfcUfgUfususu | |
| AD- | AfsasCfaGfuGfuUfCfUfuGfc | 55 | usUfsaUfaGfaY120cAfagaAfc | 207 |
| 674111.1 | UfcUfaUfaAfL96 | | AfcUfgUfususu | |
| AD- | AfsasCfaGfuGfuUfCfUfuGfc | 55 | usUfsaUfaGfaGfY121AfagaAf | 208 |
| 674112.1 | UfcUfaUfaAfL96 | | cAfcUfgUfususu | |
| AD- | AfsasCfaGfuGfuUfCfUfuGfc | 55 | usUfsaUfaGfaGfcY119agaAfc | 209 |
| 674113.1 | UfcUfaUfaAfL96 | | AfcUfgUfususu | |
| AD- | AfsasCfaGfuGfuUfCfUfuGfc | 55 | usUfsaUfaGfaGfcAfY119gaAf | 210 |
| 674114.1 | UfcUfaUfaAfL96 | | cAfcUfgUfususu | |
| AD- | AfsasCfaGfuGfuUfCfUfuGfc | 55 | usUfsaUfaGfaGfcAfaY120aAf | 211 |
| 674115.1 | UfcUfaUfaAfL96 | | cAfcUfgUfususu | |
| AD- | AfsasCfaGfuGfuUfCfUfuGfc | 55 | usUfsaUfaGfaGfcAfagY119Af | 212 |
| 674116.1 | UfcUfaUfaAfL96 | | cAfcUfgUfususu | |
| AD- | AfsasCfaGfuGfuUfCfUfuGfc | 55 | usUfsaUfaGfaGfcAfagaY119c | 213 |
| 674117.1 | UfcUfaUfaAfL96 | | AfcUfgUfususu | |
| AD- | AfsasCfaGfuGfuUfCfUfuGfc | 55 | usUfsaUfaGfaGfcAfagaAfY12 | 214 |
| 674118.1 | UfcUfaUfaAfL96 | | 1AfcUfgUfususu | |
| AD- | AfsasCfaGfuGfuUfCfUfuGfc | 55 | usUfsaUfaGfaGfcAfagaAfcY1 | 215 |
| 674119.1 | UfcUfaUfaAfL96 | | 19cUfgUfususu | |
| AD- | AfsasCfaGfuGfuUfCfUfuGfc | 55 | usUfsaUfaGfaGfcAfagaAfcAf | 216 |
| 674120.1 | UfcUfaUfaAfL96 | | Y121UfgUfususu | |
| AD- | AfsasCfaGfuGfuUfCfUfuGfc | 55 | usUfsaUfaGfaGfcAfagaAfcAf | 217 |
| 674121.1 | UfcUfaUfaAfL96 | | CY122gUfususu | |
| AD- | AfsasCfaGfuGfuUfCfUfuGfc | 55 | usUfsaUfaGfaGfcAfagaAfcAf | 218 |
| 674122.1 | UfcUfaUfaAfL96 | | cUfY120Ufususu | |
| AD- | AfsasCfaGfuGfuUfCfUfuGfc | 55 | usUfsaUfaGfaGfcAfagaAfcAf | 219 |
| 674123.1 | UfcUfaUfaAfL96 | | cUfgY122ususu | |
| AD- | AfsasCfaGfuGfuUfCfUfuGfc | 55 | usUfsaUfaGfaGfcAfagaAfcAf | 220 |
| 674124.1 | UfcUfaUfaAfL96 | | cUfgUfY122susu | |
| AD- | AfsasCfaGfuGfuUfCfUfuGfc | 55 | usUfsaUfaGfaGfcAfagaAfcAf | 221 |
| 674125.1 | UfcUfaUfaAfL96 | | cUfgUfusY122su | |
| AD- | AfsasCfaGfuGfuUfCfUfuGfc | 55 | usUfsaUfaGfaGfcAfagaAfcAf | 222 |
| 674126.1 | UfcUfaUfaAfL96 | | cUfgUfususY122 | |

Y119
4′-(R)-methyl-9-(alpha-L-
threofuranosyl)adenine 2′-
phosphate [chemical structure]
Y119s
4′-(R)-methyl-9-(alpha-L-
threofuranosyl)adenine 2′-
phosphorothioate [chemical structure]
Y120
4′-(R)-methyl-9-(alpha-L-
threofuranosyl)guanine 2′-
phosphate [chemical structure]
Y120s
4′-(R)-methyl-9-(alpha-L-
threofuranosyl)guanine 2′-
phosphorothioate [chemical structure]
Y121
4′-(R)-methyl-1-(alpha-L-
threofuranosyl)cytosine 2′-
phosphate [chemical structure]
Y121s
4′-(R)-methyl-1-(alpha-L-
threofuranosyl)cytosine 2′-
phosphorothioate [chemical structure]
Y122
4′-(R)-methyl-1-(alpha-L-
threofuranosy1)thymine 2′-
phosphate [chemical structure]
Y122s
4′-(R)-methyl-1-(alpha-L-
threofuranosyl)thymine 2′-
phosphorothioate [chemical structure]
Y123
4′-(S)-methyl-9-(alpha-L-
threofuranosyl)adenine 2′-
phosphate [chemical structure]
Y123s
4′-(S)-methyl-9-(alpha-L-
threofuranosyl)adenine 2′-
phosphorothioate [chemical structure]
Y124
4′-(S)-methyl-9-(alpha-L-
threofuranosyl)guanine 2′-
phosphate [chemical structure]
Y124s
4′-(S)-methyl-9-(alpha-L-
threofuranosyl)guanine 2′-
phosphorothioate [chemical structure]
Y125
4′-(S)-methyl-1-(alpha-L-
threofuranosyl)cytosine 2′-
phosphate [chemical structure]
Y125s
4′-(S)-methyl-1-(alpha-L-
threofuranosyl)cytosine 2′-
phosphorothioate [chemical structure]
Y126
4′-(S)-methyl-1-(alpha-L-
threofuranosyl)thymine 2′-
phosphate [chemical structure]
Y126s
4′-(S)-methyl-1-(alpha-L-
threofuranosyl)thymine 2′-
phosphorothioate

[chemical structure]

### Example 7: Post-Synthetic Conjugation of Ligands (e.g., Lipophilic Moities) to an siRNA Duplex

[1216] Various ligands, including various lipophilic moieties, can be conjugated to siRNA agents via post-synthesis conjugation methods, as shown in Schemes 17 and 18 below. Amino derivative of sense or antisense strand of siRNA was reacted either with NHIS esters of lipophilic ligands or carboxylic acids under peptide coupling conditions. These singles strands were then purified and combined with other strands to make siRNA duplexes.

[chemical structure]

[1217] Scheme 17 illustrates a protocol for post-synthetic, internal conjugation of lipophiles to siRNA duplexes. In Scheme 17, R or COR═C₆-C₃₀ acid (e.g., hexanoic acid, heptanoic acid, octanoic acid, nonanoic acid, decanoic acid, undecanoic acid, dodcanoic acid, tridecanoic acid, tetradecanoic acid, pentadecanoic acid, hexadecanoic acid, heptadecanoic acid, octadecanoic acid, oleic acid, linoleic acid, arachidonic acid, cis-4,7,10,13,16,19-docosahexanoic acid, vitamin A, vitamin E, cholesterol etc. COOR═C₆-C₃₀ alcohols (e.g., hexanol, heptanol, octanol, nonanol, decanol, undecanol, dodcanol, tridecanol, tetradecanol, pentadecanol, hexadecanol, heptadecanol, octadecanol, oleyl alcohol, linoleyl alcohol, arachidonic alcohol, cis-4,7,10,13,16,19-docosahexanol, retinol, vitamin E, cholesterol etc.).

[chemical structure]

[1218] Scheme 18 illustrates an alternative protocol for post-synthetic, internal conjugation of lipophiles to siRNA duplexes. In Scheme 18, R, COR, or COOR═C₆-C₃₀ acid (e.g., hexanoic acid, heptanoic acid, octanoic acid, nonanoic acid, decanoic acid, undecanoic acid, dodcanoic acid, tridecanoic acid, tetradecanoic acid, pentadecanoic acid, hexadecanoic acid, heptadecanoic acid, octadecanoic acid, oleic acid, linoleic acid, arachidonic acid, cis-4,7,10,13,16,19-docosahexanoic acid, vitamin A, vitamin E, cholesterol etc.). COOR═C₆-C₃₀ alcohols (e.g., hexanol, heptanol, octanol, nonanol, decanol, undecanol, dodcanol, tridecanol, tetradecanol, pentadecanol, hexadecanol, heptadecanol, octadecanol, oleyl alcohol, linoleyl alcohol, arachidonic alcohol, cis-4,7,10,13,16,19-docosahexanol, retinol, vitamin E, cholesterol etc.).

### Example 8: Internal Conjugation of Lipophiles to an siRNA Duplex

[chemical structure]

[1219] Scheme 19 illustrates a synthetic protocol for internal conjugation of lipophiles to siRNA duplexes. In Scheme 19, the lipophile moiety, R, may be C₆-C₃₀ alcohols (e.g., hexanol, heptanol, octanol, nonanol, decanol, undecanol, dodcanol, tridecanol, tetradecanol, pentadecanol, hexadecanol, heptadecanol, octadecanol, oleyl alcohol, linoleyl alcohol, arachidonic alcohol, cis-4,7,10,13,16,19-docosahexanol, retinol, vitamin E, cholesterol etc).

[chemical structure]

[1220] Scheme 20 illustrates an alternative synthetic protocol for internal conjugation of lipophiles to siRNA duplexes. In Scheme 20, the lipophile moiety, R, may be C₆-C₃₀ alcohols (e.g., hexanol, heptanol, octanol, nonanol, decanol, undecanol, dodcanol, tridecanol, tetradecanol, pentadecanol, hexadecanol, heptadecanol, octadecanol, oleyl alcohol, linoleyl alcohol, arachidonic alcohol, cis-4,7,10,13,16,19-docosahexanol, retinol, vitamin E, cholesterol etc.).

### Example 9: Synthesis of siRNA Conjugates Having Terminal Acids Functionality

[chemical structure]

[chemical structure]

[1221] Various ligands, including various lipophilic moieties having carboxylic moieties can be conjugated to siRNA agents at terminals and internal positions via on column or post-synthetic conjugation, as shown in scheme 21.

[1222] Solid supported single strands containing lipophilic moieties having terminal esters are first treated with 20% piperidine in water overnight followed by 2:1 NH₄OH in ethanol for 15 hours at room temperature to generate single strands having terminal carboxylic acids. These single strands are combined with corresponding antisense strands to generate siRNA duplexes for various assays.

### REFERENCES

[1223] All publications and patents mentioned herein, including those items listed below, are hereby incorporated by reference in their entirety as if each individual publication or patent was specifically and individually indicated to be incorporated by reference. In case of conflict, the present application, including any definitions herein, will control.

The application's sequence listing, which the Patent Office published only in electronic form, follows.

SEQUENCE LISTING (222 sequences)

SEQ ID NO: 1 - protein, 8 aa, unidentified
GRGDSPKC

SEQ ID NO: 2 - protein, 5 aa, unidentified
  SITE 4: note = D-phenylalanine
  REGION 1..5: note = cyclic
RGDFC

SEQ ID NO: 3 - skipped

SEQ ID NO: 4 - protein, 29 aa, unidentified
AALEALAEALEALAEALEALAEAAAAGGC

SEQ ID NO: 5 - protein, 30 aa, unidentified
AALAEALAEALAEALAEALAEALAAAAGGC

SEQ ID NO: 6 - protein, 15 aa, unidentified
ALEALAEALEALAEA

SEQ ID NO: 7 - protein, 22 aa, unidentified
GLFEAIEGFIENGWEGMIWDYG

SEQ ID NO: 8 - protein, 23 aa, unidentified
GLFGAIAGFIENGWEGMIDGWYG

SEQ ID NO: 9 - protein, 43 aa, unidentified
GLFEAIEGFIENGWEGMIDGWYGCGLFEAIEGFIENGWEGMID

SEQ ID NO: 10 - protein, 44 aa, unidentified
GLFEAIEGFIENGWEGMIDGGCGLFEAIEGFIENGWEGMIDGGC

SEQ ID NO: 11 - protein, 35 aa, unidentified
GLFGALAEALAEALAEHLAEALAEALEALAAGGSC

SEQ ID NO: 12 - protein, 34 aa, unidentified
GLFEAIEGFIENGWEGLAEALAEALEALAAGGSC

SEQ ID NO: 13 - protein, 41 aa, unidentified
  SITE 17: note = Norleucine
  SITE 38: note = Norleucine
GLFEAIEGFIENGWEGXIDGKGLFEAIEGFIENGWEGXIDG

SEQ ID NO: 14 - protein, 19 aa, unidentified
LFEALLELLESLWELLLEA

SEQ ID NO: 15 - protein, 20 aa, unidentified
GLFKALLKLLKSLWKLLLKA

SEQ ID NO: 16 - protein, 20 aa, unidentified
GLFRALLRLLRSLWRLLLRA

SEQ ID NO: 17 - protein, 30 aa, unidentified
WEAKLAKALAKALAKHLAKALAKALKACEA

SEQ ID NO: 18 - protein, 22 aa, unidentified
GLFFEAIAEFIEGGWEGLIEGC

SEQ ID NO: 19 - protein, 26 aa, unidentified
GIGAVLKVLTTGLPALISWIKRKRQQ

SEQ ID NO: 20 - protein, 8 aa, unidentified
HHHHHWYG

SEQ ID NO: 21 - protein, 10 aa, unidentified
CHKKKKKKHC

SEQ ID NO: 22 - protein, 16 aa, unidentified
RQIKIWFQNRRMKWKK

SEQ ID NO: 23 - protein, 14 aa, unidentified
GRKKRRQRRRPPQC

SEQ ID NO: 24 - protein, 27 aa, unidentified
GALFLGWLGAAGSTMGAWSQPKKKRKV

SEQ ID NO: 25 - protein, 18 aa, unidentified
LLIILRRRIRKQAHAHSK

SEQ ID NO: 26 - protein, 26 aa, unidentified
GWTLNSAGYLLKINLKALAALAKKIL

SEQ ID NO: 27 - protein, 18 aa, unidentified
KLALKLALKALKAALKLA

SEQ ID NO: 28 - protein, 9 aa, unidentified
RRRRRRRRR

SEQ ID NO: 29 - protein, 10 aa, unidentified
KFFKFFKFFK

SEQ ID NO: 30 - protein, 37 aa, unidentified
LLGDFFRKSKEKIGKEFKRIVQRIKDFLRNLVPRTES

SEQ ID NO: 31 - protein, 31 aa, unidentified
SWLSKTAKKLENSAKKRISEGIAIAIQGGPR

SEQ ID NO: 32 - protein, 30 aa, unidentified
ACYCRIPACIAGERRYGTCIYQGRLWAFCC

SEQ ID NO: 33 - protein, 36 aa, unidentified
DHYNCVSSGGQCLYSACPIFTKIQGTCYRGKAKCCK

SEQ ID NO: 34 - protein, 42 aa, unidentified
  SITE 42: note = C-terminal amide
RRRPRPPYLPRPRPPPFFPPRLPPRIPPGFPPRFPPRFPGKR

SEQ ID NO: 35 - protein, 13 aa, unidentified
  SITE 13: note = C-terminal amide
ILPWKWPWWPWRR

SEQ ID NO: 36 - protein, 16 aa, unidentified
AAVALLPAVLLALLAP

SEQ ID NO: 37 - protein, 11 aa, unidentified
AALLPVLLAAP

SEQ ID NO: 38 - protein, 12 aa, unidentified
RKCRIVVIRVCR

SEQ ID NO: 39 - RNA, 21 nt, synthetic construct
  source 1..21: mol_type = other RNA
  modified_base 1: mod_base = OTHER; note = 2'-O-methyladenosine-3'-phosphorothioate
  modified_base 2: mod_base = OTHER; note = 2'-O-methyladenosine-3'-phosphorothioate
  modified_base 3: mod_base = OTHER; note = 2'-deoxy-2'-fluorocytidine-3'-phosphate
  modified_base 4: mod_base = OTHER; note = 2'-O-methyladenosine-3'-phosphate
  modified_base 5: mod_base = OTHER; note = 2'-deoxy-2'-fluoroguanosine-3'-phosphate
  modified_base 6: mod_base = OTHER; note = 2'-O-methyluridine-3'-phosphate
  modified_base 7: mod_base = OTHER; note = 2'-deoxy-2'-fluoroguanosine-3'-phosphate
  modified_base 8: mod_base = OTHER; note = 2'-O-methyluridine-3'-phosphate
  modified_base 9: mod_base = OTHER; note = 2'-deoxy-2'-fluorouridine-3'-phosphate
  modified_base 10: mod_base = OTHER; note = 2'-deoxy-2'-fluorocytidine-3'-phosphate
  modified_base 11: mod_base = OTHER; note = 2'-deoxy-2'-fluorouridine-3'-phosphate
  modified_base 12: mod_base = OTHER; note = 2'-O-methyluridine-3'-phosphate
  modified_base 13: mod_base = OTHER; note = 2'-deoxy-2'-fluoroguanosine-3'-phosphate
  modified_base 14: mod_base = OTHER; note = 2'-O-methylcytidine-3'-phosphate
  modified_base 15: mod_base = OTHER; note = 2'-deoxy-2'-fluorouridine-3'-phosphate
  modified_base 16: mod_base = OTHER; note = 2'-O-methylcytidine-3'-phosphate
  modified_base 17: mod_base = OTHER; note = 2'-deoxy-2'-fluorouridine-3'-phosphate
  modified_base 18: mod_base = OTHER; note = 2'-O-methyladenosine-3'-phosphate
  modified_base 19: mod_base = OTHER; note = 2'-deoxy-2'-fluorouridine-3'-phosphate
  modified_base 20: mod_base = OTHER; note = 2'-O-methyladenosine-3'-phosphate
  modified_base 21: mod_base = OTHER; note = 2'-deoxy-2'-fluoroadenosine-3'-phosphate ((2S,4R)-1-[29-[[2-(acetylamino)-2-deoxy-beta-D-galactopyra nosyl]oxy]-14,14-bis[[3-[[3-[[5-[[2-(acetylamino)-2-deoxy-b eta-D-galactopyranosyl]oxy]-1-oxopentyl]amino]propyl]amino] -3-oxopropoxy]methyl]-1,12,19,25-tetraoxo-16-oxa-13,20,24-t riazanonacos-1-yl]-4-hydroxy-2-pyrrolidinyl)methyl ester
aacagtgttcttgctctataa

SEQ ID NO: 40 - RNA, 23 nt, synthetic construct
  source 1..23: mol_type = other RNA
  modified_base 1: mod_base = OTHER; note = 1-(alpha-L-threofuranosyl)thymine 2'-phosphate
  modified_base 2: mod_base = OTHER; note = 2'-deoxy-2'-fluorouridine-3'-phosphorothioate
  modified_base 3: mod_base = OTHER; note = 2'-O-methyladenosine-3'-phosphate
  modified_base 4: mod_base = OTHER; note = 2'-deoxy-2'-fluorouridine-3'-phosphate
  modified_base 5: mod_base = OTHER; note = 2'-O-methyladenosine-3'-phosphate
  modified_base 6: mod_base = OTHER; note = 2'-deoxy-2'-fluoroguanosine-3'-phosphate
  modified_base 7: mod_base = OTHER; note = 2'-O-methyladenosine-3'-phosphate
  modified_base 8: mod_base = OTHER; note = 2'-deoxy-2'-fluoroguanosine-3'-phosphate
  modified_base 9: mod_base = OTHER; note = 2'-O-methylcytidine-3'-phosphate
  modified_base 10: mod_base = OTHER; note = 2'-deoxy-2'-fluoroadenosine-3'-phosphate
  modified_base 11: mod_base = OTHER; note = 2'-O-methyladenosine-3'-phosphate
  modified_base 12: mod_base = OTHER; note = 2'-O-methylguanosine-3'-phosphate
  modified_base 13: mod_base = OTHER; note = 2'-O-methyladenosine-3'-phosphate
  modified_base 14: mod_base = OTHER; note = 2'-deoxy-2'-fluoroadenosine-3'-phosphate
  modified_base 15: mod_base = OTHER; note = 2'-O-methylcytidine-3'-phosphate
  modified_base 16: mod_base = OTHER; note = 2'-deoxy-2'-fluoroadenosine-3'-phosphate
  modified_base 17: mod_base = OTHER; note = 2'-O-methylcytidine-3'-phosphate
  modified_base 18: mod_base = OTHER; note = 2'-deoxy-2'-fluorouridine-3'-phosphate
  modified_base 19: mod_base = OTHER; note = 2'-O-methylguanosine-3'-phosphate
  modified_base 20: mod_base = OTHER; note = 2'-deoxy-2'-fluorouridine-3'-phosphate
  modified_base 21: mod_base = OTHER; note = 2'-O-methyluridine-3'-phosphorothioate
  modified_base 22: mod_base = OTHER; note = 2'-O-methyluridine-3'-phosphorothioate
  modified_base 23: mod_base = OTHER; note = 2'-O-methyluridine
ttatagagcaagaacactgtttt

SEQ ID NO: 41 - RNA, 21 nt, synthetic construct
  source 1..21: mol_type = other RNA
  modified_base 1: mod_base = OTHER; note = 2'-O-methyladenosine-3'-phosphorothioate
  modified_base 2: mod_base = OTHER; note = 2'-O-methyladenosine-3'-phosphorothioate
  modified_base 3: mod_base = OTHER; note = 2'-deoxy-2'-fluorocytidine-3'-phosphate
  modified_base 4: mod_base = OTHER; note = 2'-O-methyladenosine-3'-phosphate
  modified_base 5: mod_base = OTHER; note = 2'-deoxy-2'-fluoroguanosine-3'-phosphate
  modified_base 6: mod_base = OTHER; note = 2'-O-methyluridine-3'-phosphate
  modified_base 7: mod_base = OTHER; note = 2'-deoxy-2'-fluoroguanosine-3'-phosphate
  modified_base 8: mod_base = OTHER; note = 2'-O-methyluridine-3'-phosphate
  modified_base 9: mod_base = OTHER; note = 2'-deoxy-2'-fluorouridine-3'-phosphate
  modified_base 10: mod_base = OTHER; note = 2'-deoxy-2'-fluorocytidine-3'-phosphate
  modified_base 11: mod_base = OTHER; note = 2'-deoxy-2'-fluorouridine-3'-phosphate
  modified_base 12: mod_base = OTHER; note = 2'-O-methyluridine-3'-phosphate
  modified_base 13: mod_base = OTHER; note = 2'-deoxy-2'-fluoroguanosine-3'-phosphate
  modified_base 14: mod_base = OTHER; note = 2'-O-methylcytidine-3'-phosphate
  modified_base 15: mod_base = OTHER; note = 2'-deoxy-2'-fluorouridine-3'-phosphate
  modified_base 16: mod_base = OTHER; note = 2'-O-methylcytidine-3'-phosphate
  modified_base 17: mod_base = OTHER; note = 2'-deoxy-2'-fluorouridine-3'-phosphate
  modified_base 18: mod_base = OTHER; note = 2'-O-methyladenosine-3'-phosphate
  modified_base 19: mod_base = OTHER; note = 2'-deoxy-2'-fluorouridine-3'-phosphate
  modified_base 20: mod_base = OTHER; note = 2'-O-methyladenosine-3'-phosphate
  modified_base 21: mod_base = OTHER; note = 2'-deoxy-2'-fluoroadenosine-3'-phosphate ((2S,4R)-1-[29-[[2-(acetylamino)-2-deoxy-beta-D-galactopyra nosyl]oxy]-14,14-bis[[3-[[3-[[5-[[2-(acetylamino)-2-deoxy-b eta-D-galactopyranosyl]oxy]-1-oxopentyl]amino]propyl]amino] -3-oxopropoxy]methyl]-1,12,19,25-tetraoxo-16-oxa-13,20,24-t riazanonacos-1-yl]-4-hydroxy-2-pyrrolidinyl)methyl ester
aacagtgttcttgctctataa

SEQ ID NO: 42 - RNA, 23 nt, synthetic construct
  source 1..23: mol_type = other RNA
  modified_base 1: mod_base = OTHER; note = 1-(alpha-L-threofuranosyl)thymine 2',3'-diphosphate
  modified_base 2: mod_base = OTHER; note = 2'-deoxy-2'-fluorouridine-3'-phosphorothioate
  modified_base 3: mod_base = OTHER; note = 2'-O-methyladenosine-3'-phosphate
  modified_base 4: mod_base = OTHER; note = 2'-deoxy-2'-fluorouridine-3'-phosphate
  modified_base 5: mod_base = OTHER; note = 2'-O-methyladenosine-3'-phosphate
  modified_base 6: mod_base = OTHER; note = 2'-deoxy-2'-fluoroguanosine-3'-phosphate
  modified_base 7: mod_base = OTHER; note = 2'-O-methyladenosine-3'-phosphate
  modified_base 8: mod_base = OTHER; note = 2'-deoxy-2'-fluoroguanosine-3'-phosphate
  modified_base 9: mod_base = OTHER; note = 2'-O-methylcytidine-3'-phosphate
  modified_base 10: mod_base = OTHER; note = 2'-deoxy-2'-fluoroadenosine-3'-phosphate
  modified_base 11: mod_base = OTHER; note = 2'-O-methyladenosine-3'-phosphate
  modified_base 12: mod_base = OTHER; note = 2'-O-methylguanosine-3'-phosphate
  modified_base 13: mod_base = OTHER; note = 2'-O-methyladenosine-3'-phosphate
  modified_base 14: mod_base = OTHER; note = 2'-deoxy-2'-fluoroadenosine-3'-phosphate
  modified_base 15: mod_base = OTHER; note = 2'-O-methylcytidine-3'-phosphate
  modified_base 16: mod_base = OTHER; note = 2'-deoxy-2'-fluoroadenosine-3'-phosphate
  modified_base 17: mod_base = OTHER; note = 2'-O-methylcytidine-3'-phosphate
  modified_base 18: mod_base = OTHER; note = 2'-deoxy-2'-fluorouridine-3'-phosphate
  modified_base 19: mod_base = OTHER; note = 2'-O-methylguanosine-3'-phosphate
  modified_base 20: mod_base = OTHER; note = 2'-deoxy-2'-fluorouridine-3'-phosphate
  modified_base 21: mod_base = OTHER; note = 2'-O-methyluridine-3'-phosphorothioate
  modified_base 22: mod_base = OTHER; note = 2'-O-methyluridine-3'-phosphorothioate
  modified_base 23: mod_base = OTHER; note = 2'-O-methyluridine
ttatagagcaagaacactgtttt

SEQ ID NO: 43 - RNA, 21 nt, synthetic construct
  source 1..21: mol_type = other RNA
  modified_base 1: mod_base = OTHER; note = 2'-O-methyladenosine-3'-phosphorothioate
  modified_base 2: mod_base = OTHER; note = 2'-O-methyladenosine-3'-phosphorothioate
  modified_base 3: mod_base = OTHER; note = 2'-deoxy-2'-fluorocytidine-3'-phosphate
  modified_base 4: mod_base = OTHER; note = 2'-O-methyladenosine-3'-phosphate
  modified_base 5: mod_base = OTHER; note = 2'-deoxy-2'-fluoroguanosine-3'-phosphate
  modified_base 6: mod_base = OTHER; note = 2'-O-methyluridine-3'-phosphate
  modified_base 7: mod_base = OTHER; note = 2'-deoxy-2'-fluoroguanosine-3'-phosphate
  modified_base 8: mod_base = OTHER; note = 2'-O-methyluridine-3'-phosphate
  modified_base 9: mod_base = OTHER; note = 2'-deoxy-2'-fluorouridine-3'-phosphate
  modified_base 10: mod_base = OTHER; note = 2'-deoxy-2'-fluorocytidine-3'-phosphate
  modified_base 11: mod_base = OTHER; note = 2'-deoxy-2'-fluorouridine-3'-phosphate
  modified_base 12: mod_base = OTHER; note = 2'-O-methyluridine-3'-phosphate
  modified_base 13: mod_base = OTHER; note = 2'-deoxy-2'-fluoroguanosine-3'-phosphate
  modified_base 14: mod_base = OTHER; note = 2'-O-methylcytidine-3'-phosphate
  modified_base 15: mod_base = OTHER; note = 2'-deoxy-2'-fluorouridine-3'-phosphate
  modified_base 16: mod_base = OTHER; note = 2'-O-methylcytidine-3'-phosphate
  modified_base 17: mod_base = OTHER; note = 2'-deoxy-2'-fluorouridine-3'-phosphate
  modified_base 18: mod_base = OTHER; note = 2'-O-methyladenosine-3'-phosphate
  modified_base 19: mod_base = OTHER; note = 2'-deoxy-2'-fluorouridine-3'-phosphate
  modified_base 20: mod_base = OTHER; note = 2'-O-methyladenosine-3'-phosphate
  modified_base 21: mod_base = OTHER; note = 2'-deoxy-2'-fluoroadenosine-3'-phosphate ((2S,4R)-1-[29-[[2-(acetylamino)-2-deoxy-beta-D-galactopyra nosyl]oxy]-14,14-bis[[3-[[3-[[5-[[2-(acetylamino)-2-deoxy-b eta-D-galactopyranosyl]oxy]-1-oxopentyl]amino]propyl]amino] -3-oxopropoxy]methyl]-1,12,19,25-tetraoxo-16-oxa-13,20,24-t riazanonacos-1-yl]-4-hydroxy-2-pyrrolidinyl)methyl ester
aacagtgttcttgctctataa

SEQ ID NO: 44 - RNA, 23 nt, synthetic construct
  source 1..23: mol_type = other RNA
  modified_base 1: mod_base = OTHER; note = 1-(alpha-L-threofuranosyl)thymine 2'-phosphorothioate
  modified_base 2: mod_base = OTHER; note = 2'-deoxy-2'-fluorouridine-3'-phosphorothioate
  modified_base 3: mod_base = OTHER; note = 2'-O-methyladenosine-3'-phosphate
  modified_base 4: mod_base = OTHER; note = 2'-deoxy-2'-fluorouridine-3'-phosphate
  modified_base 5: mod_base = OTHER; note = 2'-O-methyladenosine-3'-phosphate
  modified_base 6: mod_base = OTHER; note = 2'-deoxy-2'-fluoroguanosine-3'-phosphate
  modified_base 7: mod_base = OTHER; note = 2'-O-methyladenosine-3'-phosphate
  modified_base 8: mod_base = OTHER; note = 2'-deoxy-2'-fluoroguanosine-3'-phosphate
  modified_base 9: mod_base = OTHER; note = 2'-O-methylcytidine-3'-phosphate
  modified_base 10: mod_base = OTHER; note = 2'-deoxy-2'-fluoroadenosine-3'-phosphate
  modified_base 11: mod_base = OTHER; note = 2'-O-methyladenosine-3'-phosphate
  modified_base 12: mod_base = OTHER; note = 2'-O-methylguanosine-3'-phosphate
  modified_base 13: mod_base = OTHER; note = 2'-O-methyladenosine-3'-phosphate
  modified_base 14: mod_base = OTHER; note = 2'-deoxy-2'-fluoroadenosine-3'-phosphate
  modified_base 15: mod_base = OTHER; note = 2'-O-methylcytidine-3'-phosphate
  modified_base 16: mod_base = OTHER; note = 2'-deoxy-2'-fluoroadenosine-3'-phosphate
  modified_base 17: mod_base = OTHER; note = 2'-O-methylcytidine-3'-phosphate
  modified_base 18: mod_base = OTHER; note = 2'-deoxy-2'-fluorouridine-3'-phosphate
  modified_base 19: mod_base = OTHER; note = 2'-O-methylguanosine-3'-phosphate
  modified_base 20: mod_base = OTHER; note = 2'-deoxy-2'-fluorouridine-3'-phosphate
  modified_base 21: mod_base = OTHER; note = 2'-O-methyluridine-3'-phosphorothioate
  modified_base 22: mod_base = OTHER; note = 2'-O-methyluridine-3'-phosphorothioate
  modified_base 23: mod_base = OTHER; note = 2'-O-methyluridine
ttatagagcaagaacactgtttt

SEQ ID NO: 45 - RNA, 21 nt, synthetic construct
  source 1..21: mol_type = other RNA
  modified_base 1: mod_base = OTHER; note = 2'-O-methyladenosine-3'-phosphorothioate
  modified_base 2: mod_base = OTHER; note = 2'-O-methyladenosine-3'-phosphorothioate
  modified_base 3: mod_base = OTHER; note = 2'-deoxy-2'-fluorocytidine-3'-phosphate
  modified_base 4: mod_base = OTHER; note = 2'-O-methyladenosine-3'-phosphate
  modified_base 5: mod_base = OTHER; note = 2'-deoxy-2'-fluoroguanosine-3'-phosphate
  modified_base 6: mod_base = OTHER; note = 2'-O-methyluridine-3'-phosphate
  modified_base 7: mod_base = OTHER; note = 2'-deoxy-2'-fluoroguanosine-3'-phosphate
  modified_base 8: mod_base = OTHER; note = 2'-O-methyluridine-3'-phosphate
  modified_base 9: mod_base = OTHER; note = 2'-deoxy-2'-fluorouridine-3'-phosphate
  modified_base 10: mod_base = OTHER; note = 2'-deoxy-2'-fluorocytidine-3'-phosphate
  modified_base 11: mod_base = OTHER; note = 2'-deoxy-2'-fluorouridine-3'-phosphate
  modified_base 12: mod_base = OTHER; note = 2'-O-methyluridine-3'-phosphate
  modified_base 13: mod_base = OTHER; note = 2'-deoxy-2'-fluoroguanosine-3'-phosphate
  modified_base 14: mod_base = OTHER; note = 2'-O-methylcytidine-3'-phosphate
  modified_base 15: mod_base = OTHER; note = 2'-deoxy-2'-fluorouridine-3'-phosphate
  modified_base 16: mod_base = OTHER; note = 2'-O-methylcytidine-3'-phosphate
  modified_base 17: mod_base = OTHER; note = 2'-deoxy-2'-fluorouridine-3'-phosphate
  modified_base 18: mod_base = OTHER; note = 2'-O-methyladenosine-3'-phosphate
  modified_base 19: mod_base = OTHER; note = 2'-deoxy-2'-fluorouridine-3'-phosphate
  modified_base 20: mod_base = OTHER; note = 2'-O-methyladenosine-3'-phosphate
  modified_base 21: mod_base = OTHER; note = 2'-deoxy-2'-fluoroadenosine-3'-phosphate ((2S,4R)-1-[29-[[2-(acetylamino)-2-deoxy-beta-D-galactopyra nosyl]oxy]-14,14-bis[[3-[[3-[[5-[[2-(acetylamino)-2-deoxy-b eta-D-galactopyranosyl]oxy]-1-oxopentyl]amino]propyl]amino] -3-oxopropoxy]methyl]-1,12,19,25-tetraoxo-16-oxa-13,20,24-t riazanonacos-1-yl]-4-hydroxy-2-pyrrolidinyl)methyl ester
aacagtgttcttgctctataa

SEQ ID NO: 46 - RNA, 23 nt, synthetic construct
  source 1..23: mol_type = other RNA
  modified_base 1: mod_base = OTHER; note = 1-(alpha-L-threofuranosyl)thymine 2'-phosphorothioate-3'-phosphate
  modified_base 2: mod_base = OTHER; note = 2'-deoxy-2'-fluorouridine-3'-phosphorothioate
  modified_base 3: mod_base = OTHER; note = 2'-O-methyladenosine-3'-phosphate
  modified_base 4: mod_base = OTHER; note = 2'-deoxy-2'-fluorouridine-3'-phosphate
  modified_base 5: mod_base = OTHER; note = 2'-O-methyladenosine-3'-phosphate
  modified_base 6: mod_base = OTHER; note = 2'-deoxy-2'-fluoroguanosine-3'-phosphate
  modified_base 7: mod_base = OTHER; note = 2'-O-methyladenosine-3'-phosphate
  modified_base 8: mod_base = OTHER; note = 2'-deoxy-2'-fluoroguanosine-3'-phosphate
  modified_base 9: mod_base = OTHER; note = 2'-O-methylcytidine-3'-phosphate
  modified_base 10: mod_base = OTHER; note = 2'-deoxy-2'-fluoroadenosine-3'-phosphate
  modified_base 11: mod_base = OTHER; note = 2'-O-methyladenosine-3'-phosphate
  modified_base 12: mod_base = OTHER; note = 2'-O-methylguanosine-3'-phosphate
  modified_base 13: mod_base = OTHER; note = 2'-O-methyladenosine-3'-phosphate
  modified_base 14: mod_base = OTHER; note = 2'-deoxy-2'-fluoroadenosine-3'-phosphate
  modified_base 15: mod_base = OTHER; note = 2'-O-methylcytidine-3'-phosphate
  modified_base 16: mod_base = OTHER; note = 2'-deoxy-2'-fluoroadenosine-3'-phosphate
  modified_base 17: mod_base = OTHER; note = 2'-O-methylcytidine-3'-phosphate
  modified_base 18: mod_base = OTHER; note = 2'-deoxy-2'-fluorouridine-3'-phosphate
  modified_base 19: mod_base = OTHER; note = 2'-O-methylguanosine-3'-phosphate
  modified_base 20: mod_base = OTHER; note = 2'-deoxy-2'-fluorouridine-3'-phosphate
  modified_base 21: mod_base = OTHER; note = 2'-O-methyluridine-3'-phosphorothioate
  modified_base 22: mod_base = OTHER; note = 2'-O-methyluridine-3'-phosphorothioate
  modified_base 23: mod_base = OTHER; note = 2'-O-methyluridine
ttatagagcaagaacactgtttt

SEQ ID NO: 47 - RNA, 21 nt, synthetic construct
  source 1..21: mol_type = other RNA
  modified_base 1: mod_base = OTHER; note = 2'-O-methyladenosine-3'-phosphorothioate
  modified_base 2: mod_base = OTHER; note = 2'-O-methyladenosine-3'-phosphorothioate
  modified_base 3: mod_base = OTHER; note = 2'-deoxy-2'-fluorocytidine-3'-phosphate
  modified_base 4: mod_base = OTHER; note = 2'-O-methyladenosine-3'-phosphate
  modified_base 5: mod_base = OTHER; note = 2'-deoxy-2'-fluoroguanosine-3'-phosphate
  modified_base 6: mod_base = OTHER; note = 2'-O-methyluridine-3'-phosphate
  modified_base 7: mod_base = OTHER; note = 2'-deoxy-2'-fluoroguanosine-3'-phosphate
  modified_base 8: mod_base = OTHER; note = 2'-O-methyluridine-3'-phosphate
  modified_base 9: mod_base = OTHER; note = 2'-deoxy-2'-fluorouridine-3'-phosphate
  modified_base 10: mod_base = OTHER; note = 2'-deoxy-2'-fluorocytidine-3'-phosphate
  modified_base 11: mod_base = OTHER; note = 2'-deoxy-2'-fluorouridine-3'-phosphate
  modified_base 12: mod_base = OTHER; note = 2'-O-methyluridine-3'-phosphate
  modified_base 13: mod_base = OTHER; note = 2'-deoxy-2'-fluoroguanosine-3'-phosphate
  modified_base 14: mod_base = OTHER; note = 2'-O-methylcytidine-3'-phosphate
  modified_base 15: mod_base = OTHER; note = 2'-deoxy-2'-fluorouridine-3'-phosphate
  modified_base 16: mod_base = OTHER; note = 2'-O-methylcytidine-3'-phosphate
  modified_base 17: mod_base = OTHER; note = 2'-deoxy-2'-fluorouridine-3'-phosphate
  modified_base 18: mod_base = OTHER; note = 2'-O-methyladenosine-3'-phosphate
  modified_base 19: mod_base = OTHER; note = 2'-deoxy-2'-fluorouridine-3'-phosphate
  modified_base 20: mod_base = OTHER; note = 2'-O-methyladenosine-3'-phosphate
  modified_base 21: mod_base = OTHER; note = 2'-deoxy-2'-fluoroadenosine-3'-phosphate ((2S,4R)-1-[29-[[2-(acetylamino)-2-deoxy-beta-D-galactopyra nosyl]oxy]-14,14-bis[[3-[[3-[[5-[[2-(acetylamino)-2-deoxy-b eta-D-galactopyranosyl]oxy]-1-oxopentyl]amino]propyl]amino] -3-oxopropoxy]methyl]-1,12,19,25-tetraoxo-16-oxa-13,20,24-t riazanonacos-1-yl]-4-hydroxy-2-pyrrolidinyl)methyl ester
aacagtgttcttgctctataa

SEQ ID NO: 48 - RNA, 23 nt, synthetic construct
  source 1..23: mol_type = other RNA
  modified_base 1: mod_base = OTHER; note = 2'-O-methyluridine-3'-phosphate 5'-phosphate
  modified_base 2: mod_base = OTHER; note = 2'-deoxy-2'-fluorouridine-3'-phosphorothioate
  modified_base 3: mod_base = OTHER; note = 2'-O-methyladenosine-3'-phosphate
  modified_base 4: mod_base = OTHER; note = 2'-deoxy-2'-fluorouridine-3'-phosphate
  modified_base 5: mod_base = OTHER; note = 2'-O-methyladenosine-3'-phosphate
  modified_base 6: mod_base = OTHER; note = 2'-deoxy-2'-fluoroguanosine-3'-phosphate
  modified_base 7: mod_base = OTHER; note = 2'-O-methyladenosine-3'-phosphate
  modified_base 8: mod_base = OTHER; note = 2'-deoxy-2'-fluoroguanosine-3'-phosphate
  modified_base 9: mod_base = OTHER; note = 2'-O-methylcytidine-3'-phosphate
  modified_base 10: mod_base = OTHER; note = 2'-deoxy-2'-fluoroadenosine-3'-phosphate
  modified_base 11: mod_base = OTHER; note = 2'-O-methyladenosine-3'-phosphate
  modified_base 12: mod_base = OTHER; note = 2'-O-methylguanosine-3'-phosphate
  modified_base 13: mod_base = OTHER; note = 2'-O-methyladenosine-3'-phosphate
  modified_base 14: mod_base = OTHER; note = 2'-deoxy-2'-fluoroadenosine-3'-phosphate
  modified_base 15: mod_base = OTHER; note = 2'-O-methylcytidine-3'-phosphate
  modified_base 16: mod_base = OTHER; note = 2'-deoxy-2'-fluoroadenosine-3'-phosphate
  modified_base 17: mod_base = OTHER; note = 2'-O-methylcytidine-3'-phosphate
  modified_base 18: mod_base = OTHER; note = 2'-deoxy-2'-fluorouridine-3'-phosphate
  modified_base 19: mod_base = OTHER; note = 2'-O-methylguanosine-3'-phosphate
  modified_base 20: mod_base = OTHER; note = 2'-deoxy-2'-fluorouridine-3'-phosphate
  modified_base 21: mod_base = OTHER; note = 2'-O-methyluridine-3'-phosphorothioate
  modified_base 22: mod_base = OTHER; note = 2'-O-methyluridine-3'-phosphorothioate
  modified_base 23: mod_base = OTHER; note = 2'-O-methyluridine
ttatagagcaagaacactgtttt

SEQ ID NO: 49 - RNA, 21 nt, synthetic construct
  source 1..21: mol_type = other RNA
  modified_base 1: mod_base = OTHER; note = 2'-O-methyladenosine-3'-phosphorothioate
  modified_base 2: mod_base = OTHER; note = 2'-O-methyladenosine-3'-phosphorothioate
  modified_base 3: mod_base = OTHER; note = 2'-deoxy-2'-fluorocytidine-3'-phosphate
  modified_base 4: mod_base = OTHER; note = 2'-O-methyladenosine-3'-phosphate
  modified_base 5: mod_base = OTHER; note = 2'-deoxy-2'-fluoroguanosine-3'-phosphate
  modified_base 6: mod_base = OTHER; note = 2'-O-methyluridine-3'-phosphate
  modified_base 7: mod_base = OTHER; note = 2'-deoxy-2'-fluoroguanosine-3'-phosphate
  modified_base 8: mod_base = OTHER; note = 2'-O-methyluridine-3'-phosphate
  modified_base 9: mod_base = OTHER; note = 2'-deoxy-2'-fluorouridine-3'-phosphate
  modified_base 10: mod_base = OTHER; note = 2'-deoxy-2'-fluorocytidine-3'-phosphate
  modified_base 11: mod_base = OTHER; note = 2'-deoxy-2'-fluorouridine-3'-phosphate
  modified_base 12: mod_base = OTHER; note = 2'-O-methyluridine-3'-phosphate
  modified_base 13: mod_base = OTHER; note = 2'-deoxy-2'-fluoroguanosine-3'-phosphate
  modified_base 14: mod_base = OTHER; note = 2'-O-methylcytidine-3'-phosphate
  modified_base 15: mod_base = OTHER; note = 2'-deoxy-2'-fluorouridine-3'-phosphate
  modified_base 16: mod_base = OTHER; note = 2'-O-methylcytidine-3'-phosphate
  modified_base 17: mod_base = OTHER; note = 2'-deoxy-2'-fluorouridine-3'-phosphate
  modified_base 18: mod_base = OTHER; note = 2'-O-methyladenosine-3'-phosphate
  modified_base 19: mod_base = OTHER; note = 2'-deoxy-2'-fluorouridine-3'-phosphate
  modified_base 20: mod_base = OTHER; note = 2'-O-methyladenosine-3'-phosphate
  modified_base 21: mod_base = OTHER; note = 2'-deoxy-2'-fluoroadenosine-3'-phosphate ((2S,4R)-1-[29-[[2-(acetylamino)-2-deoxy-beta-D-galactopyra nosyl]oxy]-14,14-bis[[3-[[3-[[5-[[2-(acetylamino)-2-deoxy-b eta-D-galactopyranosyl]oxy]-1-oxopentyl]amino]propyl]amino] -3-oxopropoxy]methyl]-1,12,19,25-tetraoxo-16-oxa-13,20,24-t riazanonacos-1-yl]-4-hydroxy-2-pyrrolidinyl)methyl ester
aacagtgttcttgctctataa

SEQ ID NO: 50 - RNA, 23 nt, synthetic construct
  source 1..23: mol_type = other RNA
  modified_base 1: mod_base = OTHER; note = 2'-O-methyluridine-3'-phosphorothioate 5'-phosphate
  modified_base 2: mod_base = OTHER; note = 2'-deoxy-2'-fluorouridine-3'-phosphorothioate
  modified_base 3: mod_base = OTHER; note = 2'-O-methyladenosine-3'-phosphate
  modified_base 4: mod_base = OTHER; note = 2'-deoxy-2'-fluorouridine-3'-phosphate
  modified_base 5: mod_base = OTHER; note = 2'-O-methyladenosine-3'-phosphate
  modified_base 6: mod_base = OTHER; note = 2'-deoxy-2'-fluoroguanosine-3'-phosphate
  modified_base 7: mod_base = OTHER; note = 2'-O-methyladenosine-3'-phosphate
  modified_base 8: mod_base = OTHER; note = 2'-deoxy-2'-fluoroguanosine-3'-phosphate
  modified_base 9: mod_base = OTHER; note = 2'-O-methylcytidine-3'-phosphate
  modified_base 10: mod_base = OTHER; note = 2'-deoxy-2'-fluoroadenosine-3'-phosphate
  modified_base 11: mod_base = OTHER; note = 2'-O-methyladenosine-3'-phosphate
  modified_base 12: mod_base = OTHER; note = 2'-O-methylguanosine-3'-phosphate
  modified_base 13: mod_base = OTHER; note = 2'-O-methyladenosine-3'-phosphate
  modified_base 14: mod_base = OTHER; note = 2'-deoxy-2'-fluoroadenosine-3'-phosphate
  modified_base 15: mod_base = OTHER; note = 2'-O-methylcytidine-3'-phosphate
  modified_base 16: mod_base = OTHER; note = 2'-deoxy-2'-fluoroadenosine-3'-phosphate
  modified_base 17: mod_base = OTHER; note = 2'-O-methylcytidine-3'-phosphate
  modified_base 18: mod_base = OTHER; note = 2'-deoxy-2'-fluorouridine-3'-phosphate
  modified_base 19: mod_base = OTHER; note = 2'-O-methylguanosine-3'-phosphate
  modified_base 20: mod_base = OTHER; note = 2'-deoxy-2'-fluorouridine-3'-phosphate
  modified_base 21: mod_base = OTHER; note = 2'-O-methyluridine-3'-phosphorothioate
  modified_base 22: mod_base = OTHER; note = 2'-O-methyluridine-3'-phosphorothioate
  modified_base 23: mod_base = OTHER; note = 2'-O-methyluridine
ttatagagcaagaacactgtttt

SEQ ID NO: 51 - RNA, 21 nt, synthetic construct
  source 1..21: mol_type = other RNA
  modified_base 1: mod_base = OTHER; note = 2'-O-methyladenosine-3'-phosphorothioate
  modified_base 2: mod_base = OTHER; note = 2'-O-methyladenosine-3'-phosphorothioate
  modified_base 3: mod_base = OTHER; note = 2'-deoxy-2'-fluorocytidine-3'-phosphate
  modified_base 4: mod_base = OTHER; note = 2'-O-methyladenosine-3'-phosphate
  modified_base 5: mod_base = OTHER; note = 2'-deoxy-2'-fluoroguanosine-3'-phosphate
  modified_base 6: mod_base = OTHER; note = 2'-O-methyluridine-3'-phosphate
  modified_base 7: mod_base = OTHER; note = 2'-deoxy-2'-fluoroguanosine-3'-phosphate
  modified_base 8: mod_base = OTHER; note = 2'-O-methyluridine-3'-phosphate
  modified_base 9: mod_base = OTHER; note = 2'-deoxy-2'-fluorouridine-3'-phosphate
  modified_base 10: mod_base = OTHER; note = 2'-deoxy-2'-fluorocytidine-3'-phosphate
  modified_base 11: mod_base = OTHER; note = 2'-deoxy-2'-fluorouridine-3'-phosphate
  modified_base 12: mod_base = OTHER; note = 2'-O-methyluridine-3'-phosphate
  modified_base 13: mod_base = OTHER; note = 2'-deoxy-2'-fluoroguanosine-3'-phosphate
  modified_base 14: mod_base = OTHER; note = 2'-O-methylcytidine-3'-phosphate
  modified_base 15: mod_base = OTHER; note = 2'-deoxy-2'-fluorouridine-3'-phosphate
  modified_base 16: mod_base = OTHER; note = 2'-O-methylcytidine-3'-phosphate
  modified_base 17: mod_base = OTHER; note = 2'-deoxy-2'-fluorouridine-3'-phosphate
  modified_base 18: mod_base = OTHER; note = 2'-O-methyladenosine-3'-phosphate
  modified_base 19: mod_base = OTHER; note = 2'-deoxy-2'-fluorouridine-3'-phosphate
  modified_base 20: mod_base = OTHER; note = 2'-O-methyladenosine-3'-phosphate
  modified_base 21: mod_base = OTHER; note = 2'-deoxy-2'-fluoroadenosine-3'-phosphate ((2S,4R)-1-[29-[[2-(acetylamino)-2-deoxy-beta-D-galactopyra nosyl]oxy]-14,14-bis[[3-[[3-[[5-[[2-(acetylamino)-2-deoxy-b eta-D-galactopyranosyl]oxy]-1-oxopentyl]amino]propyl]amino] -3-oxopropoxy]methyl]-1,12,19,25-tetraoxo-16-oxa-13,20,24-t riazanonacos-1-yl]-4-hydroxy-2-pyrrolidinyl)methyl ester
aacagtgttcttgctctataa

SEQ ID NO: 52 - RNA, 23 nt, synthetic construct
  source 1..23: mol_type = other RNA
  modified_base 1: mod_base = OTHER; note = 2'-O-methyluridine-3'-phosphorothioate
  modified_base 2: mod_base = OTHER; note = 2'-deoxy-2'-fluorouridine-3'-phosphorothioate
  modified_base 3: mod_base = OTHER; note = 2'-O-methyladenosine-3'-phosphate
  modified_base 4: mod_base = OTHER; note = 2'-deoxy-2'-fluorouridine-3'-phosphate
  modified_base 5: mod_base = OTHER; note = 2'-O-methyladenosine-3'-phosphate
  modified_base 6: mod_base = OTHER; note = 2'-deoxy-2'-fluoroguanosine-3'-phosphate
  modified_base 7: mod_base = OTHER; note = 2'-O-methyladenosine-3'-phosphate
  modified_base 8: mod_base = OTHER; note = 2'-deoxy-2'-fluoroguanosine-3'-phosphate
  modified_base 9: mod_base = OTHER; note = 2'-O-methylcytidine-3'-phosphate
  modified_base 10: mod_base = OTHER; note = 2'-deoxy-2'-fluoroadenosine-3'-phosphate
  modified_base 11: mod_base = OTHER; note = 2'-O-methyladenosine-3'-phosphate
  modified_base 12: mod_base = OTHER; note = 2'-O-methylguanosine-3'-phosphate
  modified_base 13: mod_base = OTHER; note = 2'-O-methyladenosine-3'-phosphate
  modified_base 14: mod_base = OTHER; note = 2'-deoxy-2'-fluoroadenosine-3'-phosphate
  modified_base 15: mod_base = OTHER; note = 2'-O-methylcytidine-3'-phosphate
  modified_base 16: mod_base = OTHER; note = 2'-deoxy-2'-fluoroadenosine-3'-phosphate
  modified_base 17: mod_base = OTHER; note = 2'-O-methylcytidine-3'-phosphate
  modified_base 18: mod_base = OTHER; note = 2'-deoxy-2'-fluorouridine-3'-phosphate
  modified_base 19: mod_base = OTHER; note = 2'-O-methylguanosine-3'-phosphate
  modified_base 20: mod_base = OTHER; note = 2'-deoxy-2'-fluorouridine-3'-phosphate
  modified_base 21: mod_base = OTHER; note = 2'-O-methyluridine-3'-phosphorothioate
  modified_base 22: mod_base = OTHER; note = 2'-O-methyluridine-3'-phosphorothioate
  modified_base 23: mod_base = OTHER; note = 2'-O-methyluridine
ttatagagcaagaacactgtttt

SEQ ID NO: 53 - RNA, 21 nt, synthetic construct
  source 1..21: mol_type = other RNA
  modified_base 1: mod_base = OTHER; note = 2'-O-methyladenosine-3'-phosphorothioate
  modified_base 2: mod_base = OTHER; note = 2'-O-methyladenosine-3'-phosphorothioate
  modified_base 3: mod_base = OTHER; note = 2'-deoxy-2'-fluorocytidine-3'-phosphate
  modified_base 4: mod_base = OTHER; note = 2'-O-methyladenosine-3'-phosphate
  modified_base 5: mod_base = OTHER; note = 2'-deoxy-2'-fluoroguanosine-3'-phosphate
  modified_base 6: mod_base = OTHER; note = 2'-O-methyluridine-3'-phosphate
  modified_base 7: mod_base = OTHER; note = 2'-deoxy-2'-fluoroguanosine-3'-phosphate
  modified_base 8: mod_base = OTHER; note = 2'-O-methyluridine-3'-phosphate
  modified_base 9: mod_base = OTHER; note = 2'-deoxy-2'-fluorouridine-3'-phosphate
  modified_base 10: mod_base = OTHER; note = 2'-deoxy-2'-fluorocytidine-3'-phosphate
  modified_base 11: mod_base = OTHER; note = 2'-deoxy-2'-fluorouridine-3'-phosphate
  modified_base 12: mod_base = OTHER; note = 2'-O-methyluridine-3'-phosphate
  modified_base 13: mod_base = OTHER; note = 2'-deoxy-2'-fluoroguanosine-3'-phosphate
  modified_base 14: mod_base = OTHER; note = 2'-O-methylcytidine-3'-phosphate
  modified_base 15: mod_base = OTHER; note = 2'-deoxy-2'-fluorouridine-3'-phosphate
  modified_base 16: mod_base = OTHER; note = 2'-O-methylcytidine-3'-phosphate
  modified_base 17: mod_base = OTHER; note = 2'-deoxy-2'-fluorouridine-3'-phosphate
  modified_base 18: mod_base = OTHER; note = 2'-O-methyladenosine-3'-phosphate
  modified_base 19: mod_base = OTHER; note = 2'-deoxy-2'-fluorouridine-3'-phosphate
  modified_base 20: mod_base = OTHER; note = 2'-O-methyladenosine-3'-phosphate
  modified_base 21: mod_base = OTHER; note = 2'-deoxy-2'-fluoroadenosine-3'-phosphate ((2S,4R)-1-[29-[[2-(acetylamino)-2-deoxy-beta-D-galactopyra nosyl]oxy]-14,14-bis[[3-[[3-[[5-[[2-(acetylamino)-2-deoxy-b eta-D-galactopyranosyl]oxy]-1-oxopentyl]amino]propyl]amino] -3-oxopropoxy]methyl]-1,12,19,25-tetraoxo-16-oxa-13,20,24-t riazanonacos-1-yl]-4-hydroxy-2-pyrrolidinyl)methyl ester
aacagtgttcttgctctataa

SEQ ID NO: 54 - RNA, 23 nt, synthetic construct
  source 1..23: mol_type = other RNA
  modified_base 1: mod_base = OTHER; note = 2'-O-methyluridine-3'-phosphate
  modified_base 2: mod_base = OTHER; note = 2'-deoxy-2'-fluorouridine-3'-phosphorothioate
  modified_base 3: mod_base = OTHER; note = 2'-O-methyladenosine-3'-phosphate
  modified_base 4: mod_base = OTHER; note = 2'-deoxy-2'-fluorouridine-3'-phosphate
  modified_base 5: mod_base = OTHER; note = 2'-O-methyladenosine-3'-phosphate
  modified_base 6: mod_base = OTHER; note = 2'-deoxy-2'-fluoroguanosine-3'-phosphate
  modified_base 7: mod_base = OTHER; note = 2'-O-methyladenosine-3'-phosphate
  modified_base 8: mod_base = OTHER; note = 2'-deoxy-2'-fluoroguanosine-3'-phosphate
  modified_base 9: mod_base = OTHER; note = 2'-O-methylcytidine-3'-phosphate
  modified_base 10: mod_base = OTHER; note = 2'-deoxy-2'-fluoroadenosine-3'-phosphate
  modified_base 11: mod_base = OTHER; note = 2'-O-methyladenosine-3'-phosphate
  modified_base 12: mod_base = OTHER; note = 2'-O-methylguanosine-3'-phosphate
  modified_base 13: mod_base = OTHER; note = 2'-O-methyladenosine-3'-phosphate
  modified_base 14: mod_base = OTHER; note = 2'-deoxy-2'-fluoroadenosine-3'-phosphate
  modified_base 15: mod_base = OTHER; note = 2'-O-methylcytidine-3'-phosphate
  modified_base 16: mod_base = OTHER; note = 2'-deoxy-2'-fluoroadenosine-3'-phosphate
  modified_base 17: mod_base = OTHER; note = 2'-O-methylcytidine-3'-phosphate
  modified_base 18: mod_base = OTHER; note = 2'-deoxy-2'-fluorouridine-3'-phosphate
  modified_base 19: mod_base = OTHER; note = 2'-O-methylguanosine-3'-phosphate
  modified_base 20: mod_base = OTHER; note = 2'-deoxy-2'-fluorouridine-3'-phosphate
  modified_base 21: mod_base = OTHER; note = 2'-O-methyluridine-3'-phosphorothioate
  modified_base 22: mod_base = OTHER; note = 2'-O-methyluridine-3'-phosphorothioate
  modified_base 23: mod_base = OTHER; note = 2'-O-methyluridine
ttatagagcaagaacactgtttt

SEQ ID NO: 55 - RNA, 21 nt, synthetic construct
  source 1..21: mol_type = other RNA
  modified_base 1: mod_base = OTHER; note = 2'-deoxy-2'-fluoroadenosine-3'-phosphorothioate
  modified_base 2: mod_base = OTHER; note = 2'-O-methyladenosine-3'-phosphorothioate
  modified_base 3: mod_base = OTHER; note = 2'-deoxy-2'-fluorocytidine-3'-phosphate
  modified_base 4: mod_base = OTHER; note = 2'-O-methyladenosine-3'-phosphate
  modified_base 5: mod_base = OTHER; note = 2'-deoxy-2'-fluoroguanosine-3'-phosphate
  modified_base 6: mod_base = OTHER; note = 2'-O-methyluridine-3'-phosphate
  modified_base 7: mod_base = OTHER; note = 2'-deoxy-2'-fluoroguanosine-3'-phosphate
  modified_base 8: mod_base = OTHER; note = 2'-O-methyluridine-3'-phosphate
  modified_base 9: mod_base = OTHER; note = 2'-deoxy-2'-fluorouridine-3'-phosphate
  modified_base 10: mod_base = OTHER; note = 2'-deoxy-2'-fluorocytidine-3'-phosphate
  modified_base 11: mod_base = OTHER; note = 2'-deoxy-2'-fluorouridine-3'-phosphate
  modified_base 12: mod_base = OTHER; note = 2'-O-methyluridine-3'-phosphate
  modified_base 13: mod_base = OTHER; note = 2'-deoxy-2'-fluoroguanosine-3'-phosphate
  modified_base 14: mod_base = OTHER; note = 2'-O-methylcytidine-3'-phosphate
  modified_base 15: mod_base = OTHER; note = 2'-deoxy-2'-fluorouridine-3'-phosphate
  modified_base 16: mod_base = OTHER; note = 2'-O-methylcytidine-3'-phosphate
  modified_base 17: mod_base = OTHER; note = 2'-deoxy-2'-fluorouridine-3'-phosphate
  modified_base 18: mod_base = OTHER; note = 2'-O-methyladenosine-3'-phosphate
  modified_base 19: mod_base = OTHER; note = 2'-deoxy-2'-fluorouridine-3'-phosphate
  modified_base 20: mod_base = OTHER; note = 2'-O-methyladenosine-3'-phosphate
  modified_base 21: mod_base = OTHER; note = 2'-deoxy-2'-fluoroadenosine-3'-phosphate ((2S,4R)-1-[29-[[2-(acetylamino)-2-deoxy-beta-D-galactopyra nosyl]oxy]-14,14-bis[[3-[[3-[[5-[[2-(acetylamino)-2-deoxy-b eta-D-galactopyranosyl]oxy]-1-oxopentyl]amino]propyl]amino] -3-oxopropoxy]methyl]-1,12,19,25-tetraoxo-16-oxa-13,20,24-t riazanonacos-1-yl]-4-hydroxy-2-pyrrolidinyl)methyl ester
aacagtgttcttgctctataa

SEQ ID NO: 56 - RNA, 23 nt, synthetic construct
  source 1..23: mol_type = other RNA
  modified_base 1: mod_base = OTHER; note = 2'-O-methyluridine-3'-phosphorothioate
  modified_base 2: mod_base = OTHER; note = 2'-deoxy-2'-fluorouridine-3'-phosphorothioate
  modified_base 3: mod_base = OTHER; note = 2'-O-methyladenosine-3'-phosphate
  modified_base 4: mod_base = OTHER; note = 2'-deoxy-2'-fluorouridine-3'-phosphate
  modified_base 5: mod_base = OTHER; note = 2'-O-methyladenosine-3'-phosphate
  modified_base 6: mod_base = OTHER; note = 2'-deoxy-2'-fluoroguanosine-3'-phosphate
  modified_base 7: mod_base = OTHER; note = 2'-O-methyladenosine-3'-phosphate
  modified_base 8: mod_base = OTHER; note = 2'-deoxy-2'-fluoroguanosine-3'-phosphate
  modified_base 9: mod_base = OTHER; note = 2'-O-methylcytidine-3'-phosphate
  modified_base 10: mod_base = OTHER; note = 2'-deoxy-2'-fluoroadenosine-3'-phosphate
  modified_base 11: mod_base = OTHER; note = 2'-O-methyladenosine-3'-phosphate
  modified_base 12: mod_base = OTHER; note = 2'-O-methylguanosine-3'-phosphate
  modified_base 13: mod_base = OTHER; note = 2'-O-methyladenosine-3'-phosphate
  modified_base 14: mod_base = OTHER; note = 2'-deoxy-2'-fluoroadenosine-3'-phosphate
  modified_base 15: mod_base = OTHER; note = 2'-O-methylcytidine-3'-phosphate
  modified_base 16: mod_base = OTHER; note = 2'-deoxy-2'-fluoroadenosine-3'-phosphate
  modified_base 17: mod_base = OTHER; note = 2'-O-methylcytidine-3'-phosphate
  modified_base 18: mod_base = OTHER; note = 2'-deoxy-2'-fluorouridine-3'-phosphate
  modified_base 19: mod_base = OTHER; note = 2'-O-methylguanosine-3'-phosphate
  modified_base 20: mod_base = OTHER; note = 2'-deoxy-2'-fluorouridine-3'-phosphate
  modified_base 21: mod_base = OTHER; note = 2'-O-methyluridine-3'-phosphorothioate
  modified_base 22: mod_base = OTHER; note = 2'-O-methyluridine-3'-phosphorothioate
  modified_base 23: mod_base = OTHER; note = 2'-O-methyluridine
ttatagagcaagaacactgtttt

SEQ ID NO: 57 - RNA, 21 nt, synthetic construct
  source 1..21: mol_type = other RNA
  modified_base 1: mod_base = OTHER; note = 2'-deoxy-2'-fluoroadenosine-3'-phosphorothioate
  modified_base 2: mod_base = OTHER; note = 2'-O-methyladenosine-3'-phosphorothioate
  modified_base 3: mod_base = OTHER; note = 2'-deoxy-2'-fluorocytidine-3'-phosphate
  modified_base 4: mod_base = OTHER; note = 2'-O-methyladenosine-3'-phosphate
  modified_base 5: mod_base = OTHER; note = 2'-deoxy-2'-fluoroguanosine-3'-phosphate
  modified_base 6: mod_base = OTHER; note = 2'-O-methyluridine-3'-phosphate
  modified_base 7: mod_base = OTHER; note = 2'-deoxy-2'-fluoroguanosine-3'-phosphate
  modified_base 8: mod_base = OTHER; note = 2'-O-methyluridine-3'-phosphate
  modified_base 9: mod_base = OTHER; note = 2'-deoxy-2'-fluorouridine-3'-phosphate
  modified_base 10: mod_base = OTHER; note = 2'-deoxy-2'-fluorocytidine-3'-phosphate
  modified_base 11: mod_base = OTHER; note = 2'-deoxy-2'-fluorouridine-3'-phosphate
  modified_base 12: mod_base = OTHER; note = 2'-O-methyluridine-3'-phosphate
  modified_base 13: mod_base = OTHER; note = 2'-deoxy-2'-fluoroguanosine-3'-phosphate
  modified_base 14: mod_base = OTHER; note = 2'-O-methylcytidine-3'-phosphate
  modified_base 15: mod_base = OTHER; note = 2'-deoxy-2'-fluorouridine-3'-phosphate
  modified_base 16: mod_base = OTHER; note = 2'-O-methylcytidine-3'-phosphate
  modified_base 17: mod_base = OTHER; note = 2'-deoxy-2'-fluorouridine-3'-phosphate
  modified_base 18: mod_base = OTHER; note = 2'-O-methyladenosine-3'-phosphate
  modified_base 19: mod_base = OTHER; note = 2'-deoxy-2'-fluorouridine-3'-phosphate
  modified_base 20: mod_base = OTHER; note = 2'-O-methyladenosine-3'-phosphate
  modified_base 21: mod_base = OTHER; note = 2'-deoxy-2'-fluoroadenosine-3'-phosphate ((2S,4R)-1-[29-[[2-(acetylamino)-2-deoxy-beta-D-galactopyra nosyl]oxy]-14,14-bis[[3-[[3-[[5-[[2-(acetylamino)-2-deoxy-b eta-D-galactopyranosyl]oxy]-1-oxopentyl]amino]propyl]amino] -3-oxopropoxy]methyl]-1,12,19,25-tetraoxo-16-oxa-13,20,24-t riazanonacos-1-yl]-4-hydroxy-2-pyrrolidinyl)methyl ester
aacagtgttcttgctctataa

SEQ ID NO: 58 - RNA, 23 nt, synthetic construct
  source 1..23: mol_type = other RNA
  modified_base 1: mod_base = OTHER; note = 2'-O-methyluridine-3'-phosphorothioate 5'-phosphate
  modified_base 2: mod_base = OTHER; note = 2'-deoxy-2'-fluorouridine-3'-phosphorothioate
  modified_base 3: mod_base = OTHER; note = 2'-O-methyladenosine-3'-phosphate
  modified_base 4: mod_base = OTHER; note = 2'-deoxy-2'-fluorouridine-3'-phosphate
  modified_base 5: mod_base = OTHER; note = 2'-O-methyladenosine-3'-phosphate
  modified_base 6: mod_base = OTHER; note = 2'-deoxy-2'-fluoroguanosine-3'-phosphate
  modified_base 7: mod_base = OTHER; note = 2'-O-methyladenosine-3'-phosphate
  modified_base 8: mod_base = OTHER; note = 2'-deoxy-2'-fluoroguanosine-3'-phosphate
  modified_base 9: mod_base = OTHER; note = 2'-O-methylcytidine-3'-phosphate
  modified_base 10: mod_base = OTHER; note = 2'-deoxy-2'-fluoroadenosine-3'-phosphate
  modified_base 11: mod_base = OTHER; note = 2'-O-methyladenosine-3'-phosphate
  modified_base 12: mod_base = OTHER; note = 2'-O-methylguanosine-3'-phosphate
  modified_base 13: mod_base = OTHER; note = 2'-O-methyladenosine-3'-phosphate
  modified_base 14: mod_base = OTHER; note = 2'-deoxy-2'-fluoroadenosine-3'-phosphate
  modified_base 15: mod_base = OTHER; note = 2'-O-methylcytidine-3'-phosphate
  modified_base 16: mod_base = OTHER; note = 2'-deoxy-2'-fluoroadenosine-3'-phosphate
  modified_base 17: mod_base = OTHER; note = 2'-O-methylcytidine-3'-phosphate
  modified_base 18: mod_base = OTHER; note = 2'-deoxy-2'-fluorouridine-3'-phosphate
  modified_base 19: mod_base = OTHER; note = 2'-O-methylguanosine-3'-phosphate
  modified_base 20: mod_base = OTHER; note = 2'-deoxy-2'-fluorouridine-3'-phosphate
  modified_base 21: mod_base = OTHER; note = 2'-O-methyluridine-3'-phosphorothioate
  modified_base 22: mod_base = OTHER; note = 2'-O-methyluridine-3'-phosphorothioate
  modified_base 23: mod_base = OTHER; note = 2'-O-methyluridine
ttatagagcaagaacactgtttt

SEQ ID NO: 59 - RNA, 21 nt, synthetic construct
  source 1..21: mol_type = other RNA
  modified_base 1: mod_base = OTHER; note = 2'-deoxy-2'-fluoroadenosine-3'-phosphorothioate
  modified_base 2: mod_base = OTHER; note = 2'-O-methyladenosine-3'-phosphorothioate
  modified_base 3: mod_base = OTHER; note = 2'-deoxy-2'-fluorocytidine-3'-phosphate
  modified_base 4: mod_base = OTHER; note = 2'-O-methyladenosine-3'-phosphate
  modified_base 5: mod_base = OTHER; note = 2'-deoxy-2'-fluoroguanosine-3'-phosphate
  modified_base 6: mod_base = OTHER; note = 2'-O-methyluridine-3'-phosphate
  modified_base 7: mod_base = OTHER; note = 2'-deoxy-2'-fluoroguanosine-3'-phosphate
  modified_base 8: mod_base = OTHER; note = 2'-O-methyluridine-3'-phosphate
  modified_base 9: mod_base = OTHER; note = 2'-deoxy-2'-fluorouridine-3'-phosphate
  modified_base 10: mod_base = OTHER; note = 2'-deoxy-2'-fluorocytidine-3'-phosphate
  modified_base 11: mod_base = OTHER; note = 2'-deoxy-2'-fluorouridine-3'-phosphate
  modified_base 12: mod_base = OTHER; note = 2'-O-methyluridine-3'-phosphate
  modified_base 13: mod_base = OTHER; note = 2'-deoxy-2'-fluoroguanosine-3'-phosphate
  modified_base 14: mod_base = OTHER; note = 2'-O-methylcytidine-3'-phosphate
  modified_base 15: mod_base = OTHER; note = 2'-deoxy-2'-fluorouridine-3'-phosphate
  modified_base 16: mod_base = OTHER; note = 2'-O-methylcytidine-3'-phosphate
  modified_base 17: mod_base = OTHER; note = 2'-deoxy-2'-fluorouridine-3'-phosphate
  modified_base 18: mod_base = OTHER; note = 2'-O-methyladenosine-3'-phosphate
  modified_base 19: mod_base = OTHER; note = 2'-deoxy-2'-fluorouridine-3'-phosphate
  modified_base 20: mod_base = OTHER; note = 2'-O-methyladenosine-3'-phosphate
  modified_base 21: mod_base = OTHER; note = 2'-deoxy-2'-fluoroadenosine-3'-phosphate ((2S,4R)-1-[29-[[2-(acetylamino)-2-deoxy-beta-D-galactopyra nosyl]oxy]-14,14-bis[[3-[[3-[[5-[[2-(acetylamino)-2-deoxy-b eta-D-galactopyranosyl]oxy]-1-oxopentyl]amino]propyl]amino] -3-oxopropoxy]methyl]-1,12,19,25-tetraoxo-16-oxa-13,20,24-t riazanonacos-1-yl]-4-hydroxy-2-pyrrolidinyl)methyl ester
aacagtgttcttgctctataa

SEQ ID NO: 60 - RNA, 23 nt, synthetic construct
  source 1..23: mol_type = other RNA
  modified_base 1: mod_base = OTHER; note = 1-(alpha-L-threofuranosyl)thymine 2'-phosphorothioate
  modified_base 2: mod_base = OTHER; note = 2'-deoxy-2'-fluorouridine-3'-phosphorothioate
  modified_base 3: mod_base = OTHER; note = 2'-O-methyladenosine-3'-phosphate
  modified_base 4: mod_base = OTHER; note = 2'-deoxy-2'-fluorouridine-3'-phosphate
  modified_base 5: mod_base = OTHER; note = 2'-O-methyladenosine-3'-phosphate
  modified_base 6: mod_base = OTHER; note = 2'-deoxy-2'-fluoroguanosine-3'-phosphate
  modified_base 7: mod_base = OTHER; note = 2'-O-methyladenosine-3'-phosphate
  modified_base 8: mod_base = OTHER; note = 2'-deoxy-2'-fluoroguanosine-3'-phosphate
  modified_base 9: mod_base = OTHER; note = 2'-O-methylcytidine-3'-phosphate
  modified_base 10: mod_base = OTHER; note = 2'-deoxy-2'-fluoroadenosine-3'-phosphate
  modified_base 11: mod_base = OTHER; note = 2'-O-methyladenosine-3'-phosphate
  modified_base 12: mod_base = OTHER; note = 2'-O-methylguanosine-3'-phosphate
  modified_base 13: mod_base = OTHER; note = 2'-O-methyladenosine-3'-phosphate
  modified_base 14: mod_base = OTHER; note = 2'-deoxy-2'-fluoroadenosine-3'-phosphate
  modified_base 15: mod_base = OTHER; note = 2'-O-methylcytidine-3'-phosphate
  modified_base 16: mod_base = OTHER; note = 2'-deoxy-2'-fluoroadenosine-3'-phosphate
  modified_base 17: mod_base = OTHER; note = 2'-O-methylcytidine-3'-phosphate
  modified_base 18: mod_base = OTHER; note = 2'-deoxy-2'-fluorouridine-3'-phosphate
  modified_base 19: mod_base = OTHER; note = 2'-O-methylguanosine-3'-phosphate
  modified_base 20: mod_base = OTHER; note = 2'-deoxy-2'-fluorouridine-3'-phosphate
  modified_base 21: mod_base = OTHER; note = 2'-O-methyluridine-3'-phosphorothioate
  modified_base 22: mod_base = OTHER; note = 2'-O-methyluridine-3'-phosphorothioate
  modified_base 23: mod_base = OTHER; note = 2'-O-methyluridine
ttatagagcaagaacactgtttt

SEQ ID NO: 61 - RNA, 21 nt, synthetic construct
  source 1..21: mol_type = other RNA
  modified_base 1: mod_base = OTHER; note = 2'-deoxy-2'-fluoroadenosine-3'-phosphorothioate
  modified_base 2: mod_base = OTHER; note = 2'-O-methyladenosine-3'-phosphorothioate
  modified_base 3: mod_base = OTHER; note = 2'-deoxy-2'-fluorocytidine-3'-phosphate
  modified_base 4: mod_base = OTHER; note = 2'-O-methyladenosine-3'-phosphate
  modified_base 5: mod_base = OTHER; note = 2'-deoxy-2'-fluoroguanosine-3'-phosphate
  modified_base 6: mod_base = OTHER; note = 2'-O-methyluridine-3'-phosphate
  modified_base 7: mod_base = OTHER; note = 2'-deoxy-2'-fluoroguanosine-3'-phosphate
  modified_base 8: mod_base = OTHER; note = 2'-O-methyluridine-3'-phosphate
  modified_base 9: mod_base = OTHER; note = 2'-deoxy-2'-fluorouridine-3'-phosphate
  modified_base 10: mod_base = OTHER; note = 2'-deoxy-2'-fluorocytidine-3'-phosphate
  modified_base 11: mod_base = OTHER; note = 2'-deoxy-2'-fluorouridine-3'-phosphate
  modified_base 12: mod_base = OTHER; note = 2'-O-methyluridine-3'-phosphate
  modified_base 13: mod_base = OTHER; note = 2'-deoxy-2'-fluoroguanosine-3'-phosphate
  modified_base 14: mod_base = OTHER; note = 2'-O-methylcytidine-3'-phosphate
  modified_base 15: mod_base = OTHER; note = 2'-deoxy-2'-fluorouridine-3'-phosphate
  modified_base 16: mod_base = OTHER; note = 2'-O-methylcytidine-3'-phosphate
  modified_base 17: mod_base = OTHER; note = 2'-deoxy-2'-fluorouridine-3'-phosphate
  modified_base 18: mod_base = OTHER; note = 2'-O-methyladenosine-3'-phosphate
  modified_base 19: mod_base = OTHER; note = 2'-deoxy-2'-fluorouridine-3'-phosphate
  modified_base 20: mod_base = OTHER; note = 2'-O-methyladenosine-3'-phosphate
  modified_base 21: mod_base = OTHER; note = 2'-deoxy-2'-fluoroadenosine-3'-phosphate ((2S,4R)-1-[29-[[2-(acetylamino)-2-deoxy-beta-D-galactopyra nosyl]oxy]-14,14-bis[[3-[[3-[[5-[[2-(acetylamino)-2-deoxy-b eta-D-galactopyranosyl]oxy]-1-oxopentyl]amino]propyl]amino] -3-oxopropoxy]methyl]-1,12,19,25-tetraoxo-16-oxa-13,20,24-t riazanonacos-1-yl]-4-hydroxy-2-pyrrolidinyl)methyl ester
aacagtgttcttgctctataa

SEQ ID NO: 62 - RNA, 23 nt, synthetic construct
  source 1..23: mol_type = other RNA
  modified_base 1: mod_base = OTHER; note = 1-(alpha-L-threofuranosyl)thymine 2'-phosphorothioate-3'-phosphate
  modified_base 2: mod_base = OTHER; note = 2'-deoxy-2'-fluorouridine-3'-phosphorothioate
  modified_base 3: mod_base = OTHER; note = 2'-O-methyladenosine-3'-phosphate
  modified_base 4: mod_base = OTHER; note = 2'-deoxy-2'-fluorouridine-3'-phosphate
  modified_base 5: mod_base = OTHER; note = 2'-O-methyladenosine-3'-phosphate
  modified_base 6: mod_base = OTHER; note = 2'-deoxy-2'-fluoroguanosine-3'-phosphate
  modified_base 7: mod_base = OTHER; note = 2'-O-methyladenosine-3'-phosphate
  modified_base 8: mod_base = OTHER; note = 2'-deoxy-2'-fluoroguanosine-3'-phosphate
  modified_base 9: mod_base = OTHER; note = 2'-O-methylcytidine-3'-phosphate
  modified_base 10: mod_base = OTHER; note = 2'-deoxy-2'-fluoroadenosine-3'-phosphate
  modified_base 11: mod_base = OTHER; note = 2'-O-methyladenosine-3'-phosphate
  modified_base 12: mod_base = OTHER; note = 2'-O-methylguanosine-3'-phosphate
  modified_base 13: mod_base = OTHER; note = 2'-O-methyladenosine-3'-phosphate
  modified_base 14: mod_base = OTHER; note = 2'-deoxy-2'-fluoroadenosine-3'-phosphate
  modified_base 15: mod_base = OTHER; note = 2'-O-methylcytidine-3'-phosphate
  modified_base 16: mod_base = OTHER; note = 2'-deoxy-2'-fluoroadenosine-3'-phosphate
  modified_base 17: mod_base = OTHER; note = 2'-O-methylcytidine-3'-phosphate
  modified_base 18: mod_base = OTHER; note = 2'-deoxy-2'-fluorouridine-3'-phosphate
  modified_base 19: mod_base = OTHER; note = 2'-O-methylguanosine-3'-phosphate
  modified_base 20: mod_base = OTHER; note = 2'-deoxy-2'-fluorouridine-3'-phosphate
  modified_base 21: mod_base = OTHER; note = 2'-O-methyluridine-3'-phosphorothioate
  modified_base 22: mod_base = OTHER; note = 2'-O-methyluridine-3'-phosphorothioate
  modified_base 23: mod_base = OTHER; note = 2'-O-methyluridine
ttatagagcaagaacactgtttt

SEQ ID NO: 63 - RNA, 21 nt, synthetic construct
  source 1..21: mol_type = other RNA
  modified_base 1: mod_base = OTHER; note = 2'-O-methyladenosine-3'-phosphorothioate
  modified_base 2: mod_base = OTHER; note = 2'-O-methyladenosine-3'-phosphorothioate
  modified_base 3: mod_base = OTHER; note = 2'-O-methylcytidine-3'-phosphate
  modified_base 4: mod_base = OTHER; note = 2'-O-methyladenosine-3'-phosphate
  modified_base 5: mod_base = OTHER; note = 2'-O-methylguanosine-3'-phosphate
  modified_base 6: mod_base = OTHER; note = 2'-O-methyluridine-3'-phosphate
  modified_base 7: mod_base = OTHER; note = 2'-deoxy-2'-fluoroguanosine-3'-phosphate
  modified_base 8: mod_base = OTHER; note = 2'-O-methyluridine-3'-phosphate
  modified_base 9: mod_base = OTHER; note = 2'-deoxy-2'-fluorouridine-3'-phosphate
  modified_base 10: mod_base = OTHER; note = 2'-deoxy-2'-fluorocytidine-3'-phosphate
  modified_base 11: mod_base = OTHER; note = 2'-deoxy-2'-fluorouridine-3'-phosphate
  modified_base 12: mod_base = OTHER; note = 2'-O-methyluridine-3'-phosphate
  modified_base 13: mod_base = OTHER; note = 2'-O-methylguanosine-3'-phosphate
  modified_base 14: mod_base = OTHER; note = 2'-O-methylcytidine-3'-phosphate
  modified_base 15: mod_base = OTHER; note = 2'-O-methyluridine-3'-phosphate
  modified_base 16: mod_base = OTHER; note = 2'-O-methylcytidine-3'-phosphate
  modified_base 17: mod_base = OTHER; note = 2'-O-methyluridine-3'-phosphate
  modified_base 18: mod_base = OTHER; note = 2'-O-methyladenosine-3'-phosphate
  modified_base 19: mod_base = OTHER; note = 2'-O-methyluridine-3'-phosphate
  modified_base 20: mod_base = OTHER; note = 2'-O-methyladenosine-3'-phosphate
  modified_base 21: mod_base = OTHER; note = 2'-O-methyladenosine-3'-phosphate ((2S,4R)-1-[29-[[2-(acetylamino)-2-deoxy-beta-D-galactopyra nosyl]oxy]-14,14-bis[[3-[[3-[[5-[[2-(acetylamino)-2-deoxy-b eta-D-galactopyranosyl]oxy]-1-oxopentyl]amino]propyl]amino] -3-oxopropoxy]methyl]-1,12,19,25-tetraoxo-16-oxa-13,20,24-t riazanonacos-1-yl]-4-hydroxy-2-pyrrolidinyl)methyl ester
aacagtgttcttgctctataa

SEQ ID NO: 64 - RNA, 23 nt, synthetic construct
  source 1..23: mol_type = other RNA
  modified_base 1: mod_base = OTHER; note = 2'-O-methyluridine-3'-phosphorothioate 5'-(E)-Vinylphosphonate
  modified_base 2: mod_base = OTHER; note = 2'-deoxy-2'-fluorouridine-3'-phosphorothioate
  modified_base 3: mod_base = OTHER; note = 2'-O-methyladenosine-3'-phosphate
  modified_base 4: mod_base = OTHER; note = 2'-O-methyluridine-3'-phosphate
  modified_base 5: mod_base = OTHER; note = 2'-O-methyladenosine-3'-phosphate
  modified_base 6: mod_base = OTHER; note = 2'-deoxy-2'-fluoroguanosine-3'-phosphate
  modified_base 7: mod_base = OTHER; note = 2'-O-methyladenosine-3'-phosphate
  modified_base 8: mod_base = OTHER; note = 2'-O-methylguanosine-3'-phosphate
  modified_base 9: mod_base = OTHER; note = 2'-O-methylcytidine-3'-phosphate
  modified_base 10: mod_base = OTHER; note = 2'-O-methyladenosine-3'-phosphate
  modified_base 11: mod_base = OTHER; note = 2'-O-methyladenosine-3'-phosphate
  modified_base 12: mod_base = OTHER; note = 2'-O-methylguanosine-3'-phosphate
  modified_base 13: mod_base = OTHER; note = 2'-O-methyladenosine-3'-phosphate
  modified_base 14: mod_base = OTHER; note = 2'-deoxy-2'-fluoroadenosine-3'-phosphate
  modified_base 15: mod_base = OTHER; note = 2'-O-methylcytidine-3'-phosphate
  modified_base 16: mod_base = OTHER; note = 2'-deoxy-2'-fluoroadenosine-3'-phosphate
  modified_base 17: mod_base = OTHER; note = 2'-O-methylcytidine-3'-phosphate
  modified_base 18: mod_base = OTHER; note = 2'-O-methyluridine-3'-phosphate
  modified_base 19: mod_base = OTHER; note = 2'-O-methylguanosine-3'-phosphate
  modified_base 20: mod_base = OTHER; note = 2'-O-methyluridine-3'-phosphate
  modified_base 21: mod_base = OTHER; note = 2'-O-methyluridine-3'-phosphorothioate
  modified_base 22: mod_base = OTHER; note = 2'-O-methyluridine-3'-phosphorothioate
  modified_base 23: mod_base = OTHER; note = 2'-O-methyluridine
ttatagagcaagaacactgtttt

SEQ ID NO: 65 - RNA, 21 nt, synthetic construct
  source 1..21: mol_type = other RNA
  modified_base 1: mod_base = OTHER; note = 2'-O-methyladenosine-3'-phosphorothioate
  modified_base 2: mod_base = OTHER; note = 2'-O-methyladenosine-3'-phosphorothioate
  modified_base 3: mod_base = OTHER; note = 2'-O-methylcytidine-3'-phosphate
  modified_base 4: mod_base = OTHER; note = 2'-O-methyladenosine-3'-phosphate
  modified_base 5: mod_base = OTHER; note = 2'-O-methylguanosine-3'-phosphate
  modified_base 6: mod_base = OTHER; note = 2'-O-methyluridine-3'-phosphate
  modified_base 7: mod_base = OTHER; note = 2'-deoxy-2'-fluoroguanosine-3'-phosphate
  modified_base 8: mod_base = OTHER; note = 2'-O-methyluridine-3'-phosphate
  modified_base 9: mod_base = OTHER; note = 2'-deoxy-2'-fluorouridine-3'-phosphate
  modified_base 10: mod_base = OTHER; note = 2'-deoxy-2'-fluorocytidine-3'-phosphate
  modified_base 11: mod_base = OTHER; note = 2'-deoxy-2'-fluorouridine-3'-phosphate
  modified_base 12: mod_base = OTHER; note = 2'-O-methyluridine-3'-phosphate
  modified_base 13: mod_base = OTHER; note = 2'-O-methylguanosine-3'-phosphate
  modified_base 14: mod_base = OTHER; note = 2'-O-methylcytidine-3'-phosphate
  modified_base 15: mod_base = OTHER; note = 2'-O-methyluridine-3'-phosphate
  modified_base 16: mod_base = OTHER; note = 2'-O-methylcytidine-3'-phosphate
  modified_base 17: mod_base = OTHER; note = 2'-O-methyluridine-3'-phosphate
  modified_base 18: mod_base = OTHER; note = 2'-O-methyladenosine-3'-phosphate
  modified_base 19: mod_base = OTHER; note = 2'-O-methyluridine-3'-phosphate
  modified_base 20: mod_base = OTHER; note = 2'-O-methyladenosine-3'-phosphate
  modified_base 21: mod_base = OTHER; note = 2'-O-methyladenosine-3'-phosphate ((2S,4R)-1-[29-[[2-(acetylamino)-2-deoxy-beta-D-galactopyra nosyl]oxy]-14,14-bis[[3-[[3-[[5-[[2-(acetylamino)-2-deoxy-b eta-D-galactopyranosyl]oxy]-1-oxopentyl]amino]propyl]amino] -3-oxopropoxy]methyl]-1,12,19,25-tetraoxo-16-oxa-13,20,24-t riazanonacos-1-yl]-4-hydroxy-2-pyrrolidinyl)methyl ester
aacagtgttcttgctctataa

SEQ ID NO: 66 - RNA, 23 nt, synthetic construct
  source 1..23: mol_type = other RNA
  modified_base 1: mod_base = OTHER; note = 2'-O-methyluridine-3'-phosphorothioate 5'-phosphate
  modified_base 2: mod_base = OTHER; note = 2'-deoxy-2'-fluorouridine-3'-phosphorothioate
  modified_base 3: mod_base = OTHER; note = 2'-O-methyladenosine-3'-phosphate
  modified_base 4: mod_base = OTHER; note = 2'-O-methyluridine-3'-phosphate
  modified_base 5: mod_base = OTHER; note = 2'-O-methyladenosine-3'-phosphate
  modified_base 6: mod_base = OTHER; note = 2'-deoxy-2'-fluoroguanosine-3'-phosphate
  modified_base 7: mod_base = OTHER; note = 2'-O-methyladenosine-3'-phosphate
  modified_base 8: mod_base = OTHER; note = 2'-O-methylguanosine-3'-phosphate
  modified_base 9: mod_base = OTHER; note = 2'-O-methylcytidine-3'-phosphate
  modified_base 10: mod_base = OTHER; note = 2'-O-methyladenosine-3'-phosphate
  modified_base 11: mod_base = OTHER; note = 2'-O-methyladenosine-3'-phosphate
  modified_base 12: mod_base = OTHER; note = 2'-O-methylguanosine-3'-phosphate
  modified_base 13: mod_base = OTHER; note = 2'-O-methyladenosine-3'-phosphate
  modified_base 14: mod_base = OTHER; note = 2'-deoxy-2'-fluoroadenosine-3'-phosphate
  modified_base 15: mod_base = OTHER; note = 2'-O-methylcytidine-3'-phosphate
  modified_base 16: mod_base = OTHER; note = 2'-deoxy-2'-fluoroadenosine-3'-phosphate
  modified_base 17: mod_base = OTHER; note = 2'-O-methylcytidine-3'-phosphate
  modified_base 18: mod_base = OTHER; note = 2'-O-methyluridine-3'-phosphate
  modified_base 19: mod_base = OTHER; note = 2'-O-methylguanosine-3'-phosphate
  modified_base 20: mod_base = OTHER; note = 2'-O-methyluridine-3'-phosphate
  modified_base 21: mod_base = OTHER; note = 2'-O-methyluridine-3'-phosphorothioate
  modified_base 22: mod_base = OTHER; note = 2'-O-methyluridine-3'-phosphorothioate
  modified_base 23: mod_base = OTHER; note = 2'-O-methyluridine
ttatagagcaagaacactgtttt

SEQ ID NO: 67 - RNA, 21 nt, synthetic construct
  source 1..21: mol_type = other RNA
  modified_base 1: mod_base = OTHER; note = 2'-O-methyladenosine-3'-phosphorothioate
  modified_base 2: mod_base = OTHER; note = 2'-O-methyladenosine-3'-phosphorothioate
  modified_base 3: mod_base = OTHER; note = 2'-O-methylcytidine-3'-phosphate
  modified_base 4: mod_base = OTHER; note = 2'-O-methyladenosine-3'-phosphate
  modified_base 5: mod_base = OTHER; note = 2'-O-methylguanosine-3'-phosphate
  modified_base 6: mod_base = OTHER; note = 2'-O-methyluridine-3'-phosphate
  modified_base 7: mod_base = OTHER; note = 2'-deoxy-2'-fluoroguanosine-3'-phosphate
  modified_base 8: mod_base = OTHER; note = 2'-O-methyluridine-3'-phosphate
  modified_base 9: mod_base = OTHER; note = 2'-deoxy-2'-fluorouridine-3'-phosphate
  modified_base 10: mod_base = OTHER; note = 2'-deoxy-2'-fluorocytidine-3'-phosphate
  modified_base 11: mod_base = OTHER; note = 2'-deoxy-2'-fluorouridine-3'-phosphate
  modified_base 12: mod_base = OTHER; note = 2'-O-methyluridine-3'-phosphate
  modified_base 13: mod_base = OTHER; note = 2'-O-methylguanosine-3'-phosphate
  modified_base 14: mod_base = OTHER; note = 2'-O-methylcytidine-3'-phosphate
  modified_base 15: mod_base = OTHER; note = 2'-O-methyluridine-3'-phosphate
  modified_base 16: mod_base = OTHER; note = 2'-O-methylcytidine-3'-phosphate
  modified_base 17: mod_base = OTHER; note = 2'-O-methyluridine-3'-phosphate
  modified_base 18: mod_base = OTHER; note = 2'-O-methyladenosine-3'-phosphate
  modified_base 19: mod_base = OTHER; note = 2'-O-methyluridine-3'-phosphate
  modified_base 20: mod_base = OTHER; note = 2'-O-methyladenosine-3'-phosphate
  modified_base 21: mod_base = OTHER; note = 2'-O-methyladenosine-3'-phosphate ((2S,4R)-1-[29-[[2-(acetylamino)-2-deoxy-beta-D-galactopyra nosyl]oxy]-14,14-bis[[3-[[3-[[5-[[2-(acetylamino)-2-deoxy-b eta-D-galactopyranosyl]oxy]-1-oxopentyl]amino]propyl]amino] -3-oxopropoxy]methyl]-1,12,19,25-tetraoxo-16-oxa-13,20,24-t riazanonacos-1-yl]-4-hydroxy-2-pyrrolidinyl)methyl ester
aacagtgttcttgctctataa

SEQ ID NO: 68 - RNA, 23 nt, synthetic construct
  source 1..23: mol_type = other RNA
  modified_base 1: mod_base = OTHER; note = 1-(alpha-L-threofuranosyl)thymine 2'-phosphorothioate
  modified_base 2: mod_base = OTHER; note = 2'-deoxy-2'-fluorouridine-3'-phosphorothioate
  modified_base 3: mod_base = OTHER; note = 2'-O-methyladenosine-3'-phosphate
  modified_base 4: mod_base = OTHER; note = 2'-O-methyluridine-3'-phosphate
  modified_base 5: mod_base = OTHER; note = 2'-O-methyladenosine-3'-phosphate
  modified_base 6: mod_base = OTHER; note = 2'-deoxy-2'-fluoroguanosine-3'-phosphate
  modified_base 7: mod_base = OTHER; note = 2'-O-methyladenosine-3'-phosphate
  modified_base 8: mod_base = OTHER; note = 2'-O-methylguanosine-3'-phosphate
  modified_base 9: mod_base = OTHER; note = 2'-O-methylcytidine-3'-phosphate
  modified_base 10: mod_base = OTHER; note = 2'-O-methyladenosine-3'-phosphate
  modified_base 11: mod_base = OTHER; note = 2'-O-methyladenosine-3'-phosphate
  modified_base 12: mod_base = OTHER; note = 2'-O-methylguanosine-3'-phosphate
  modified_base 13: mod_base = OTHER; note = 2'-O-methyladenosine-3'-phosphate
  modified_base 14: mod_base = OTHER; note = 2'-deoxy-2'-fluoroadenosine-3'-phosphate
  modified_base 15: mod_base = OTHER; note = 2'-O-methylcytidine-3'-phosphate
  modified_base 16: mod_base = OTHER; note = 2'-deoxy-2'-fluoroadenosine-3'-phosphate
  modified_base 17: mod_base = OTHER; note = 2'-O-methylcytidine-3'-phosphate
  modified_base 18: mod_base = OTHER; note = 2'-O-methyluridine-3'-phosphate
  modified_base 19: mod_base = OTHER; note = 2'-O-methylguanosine-3'-phosphate
  modified_base 20: mod_base = OTHER; note = 2'-O-methyluridine-3'-phosphate
  modified_base 21: mod_base = OTHER; note = 2'-O-methyluridine-3'-phosphorothioate
  modified_base 22: mod_base = OTHER; note = 2'-O-methyluridine-3'-phosphorothioate
  modified_base 23: mod_base = OTHER; note = 2'-O-methyluridine
ttatagagcaagaacactgtttt

SEQ ID NO: 69 - RNA, 21 nt, synthetic construct
  source 1..21: mol_type = other RNA
  modified_base 1: mod_base = OTHER; note = 2'-O-methyladenosine-3'-phosphorothioate
  modified_base 2: mod_base = OTHER; note = 2'-O-methyladenosine-3'-phosphorothioate
  modified_base 3: mod_base = OTHER; note = 2'-O-methylcytidine-3'-phosphate
  modified_base 4: mod_base = OTHER; note = 2'-O-methyladenosine-3'-phosphate
  modified_base 5: mod_base = OTHER; note = 2'-O-methylguanosine-3'-phosphate
  modified_base 6: mod_base = OTHER; note = 2'-O-methyluridine-3'-phosphate
  modified_base 7: mod_base = OTHER; note = 2'-deoxy-2'-fluoroguanosine-3'-phosphate
  modified_base 8: mod_base = OTHER; note = 2'-O-methyluridine-3'-phosphate
  modified_base 9: mod_base = OTHER; note = 2'-deoxy-2'-fluorouridine-3'-phosphate
  modified_base 10: mod_base = OTHER; note = 2'-deoxy-2'-fluorocytidine-3'-phosphate
  modified_base 11: mod_base = OTHER; note = 2'-deoxy-2'-fluorouridine-3'-phosphate
  modified_base 12: mod_base = OTHER; note = 2'-O-methyluridine-3'-phosphate
  modified_base 13: mod_base = OTHER; note = 2'-O-methylguanosine-3'-phosphate
  modified_base 14: mod_base = OTHER; note = 2'-O-methylcytidine-3'-phosphate
  modified_base 15: mod_base = OTHER; note = 2'-O-methyluridine-3'-phosphate
  modified_base 16: mod_base = OTHER; note = 2'-O-methylcytidine-3'-phosphate
  modified_base 17: mod_base = OTHER; note = 2'-O-methyluridine-3'-phosphate
  modified_base 18: mod_base = OTHER; note = 2'-O-methyladenosine-3'-phosphate
  modified_base 19: mod_base = OTHER; note = 2'-O-methyluridine-3'-phosphate
  modified_base 20: mod_base = OTHER; note = 2'-O-methyladenosine-3'-phosphate
  modified_base 21: mod_base = OTHER; note = 2'-O-methyladenosine-3'-phosphate ((2S,4R)-1-[29-[[2-(acetylamino)-2-deoxy-beta-D-galactopyra nosyl]oxy]-14,14-bis[[3-[[3-[[5-[[2-(acetylamino)-2-deoxy-b eta-D-galactopyranosyl]oxy]-1-oxopentyl]amino]propyl]amino] -3-oxopropoxy]methyl]-1,12,19,25-tetraoxo-16-oxa-13,20,24-t riazanonacos-1-yl]-4-hydroxy-2-pyrrolidinyl)methyl ester
aacagtgttcttgctctataa

SEQ ID NO: 70 - RNA, 23 nt, synthetic construct
  source 1..23: mol_type = other RNA
  modified_base 1: mod_base = OTHER; note = 1-(alpha-L-threofuranosyl)thymine 2'-phosphorothioate-3'-phosphate
  modified_base 2: mod_base = OTHER; note = 2'-deoxy-2'-fluorouridine-3'-phosphorothioate
  modified_base 3: mod_base = OTHER; note = 2'-O-methyladenosine-3'-phosphate
  modified_base 4: mod_base = OTHER; note = 2'-O-methyluridine-3'-phosphate
  modified_base 5: mod_base = OTHER; note = 2'-O-methyladenosine-3'-phosphate
  modified_base 6: mod_base = OTHER; note = 2'-deoxy-2'-fluoroguanosine-3'-phosphate
  modified_base 7: mod_base = OTHER; note = 2'-O-methyladenosine-3'-phosphate
  modified_base 8: mod_base = OTHER; note = 2'-O-methylguanosine-3'-phosphate
  modified_base 9: mod_base = OTHER; note = 2'-O-methylcytidine-3'-phosphate
  modified_base 10: mod_base = OTHER; note = 2'-O-methyladenosine-3'-phosphate
  modified_base 11: mod_base = OTHER; note = 2'-O-methyladenosine-3'-phosphate
  modified_base 12: mod_base = OTHER; note = 2'-O-methylguanosine-3'-phosphate
  modified_base 13: mod_base = OTHER; note = 2'-O-methyladenosine-3'-phosphate
  modified_base 14: mod_base = OTHER; note = 2'-deoxy-2'-fluoroadenosine-3'-phosphate
  modified_base 15: mod_base = OTHER; note = 2'-O-methylcytidine-3'-phosphate
  modified_base 16: mod_base = OTHER; note = 2'-deoxy-2'-fluoroadenosine-3'-phosphate
  modified_base 17: mod_base = OTHER; note = 2'-O-methylcytidine-3'-phosphate
  modified_base 18: mod_base = OTHER; note = 2'-O-methyluridine-3'-phosphate
  modified_base 19: mod_base = OTHER; note = 2'-O-methylguanosine-3'-phosphate
  modified_base 20: mod_base = OTHER; note = 2'-O-methyluridine-3'-phosphate
  modified_base 21: mod_base = OTHER; note = 2'-O-methyluridine-3'-phosphorothioate
  modified_base 22: mod_base = OTHER; note = 2'-O-methyluridine-3'-phosphorothioate
  modified_base 23: mod_base = OTHER; note = 2'-O-methyluridine
ttatagagcaagaacactgtttt

SEQ ID NO: 71 - RNA, 21 nt, synthetic construct
  source 1..21: mol_type = other RNA
  modified_base 1: mod_base = OTHER; note = 2'-deoxy-2'-fluorouridine-3'-phosphorothioate
  modified_base 2: mod_base = OTHER; note = 2'-O-methylguanosine-3'-phosphorothioate
  modified_base 3: mod_base = OTHER; note = 2'-deoxy-2'-fluoroadenosine-3'-phosphate
  modified_base 4: mod_base = OTHER; note = 2'-O-methylcytidine-3'-phosphate
  modified_base 5: mod_base = OTHER; note = 2'-deoxy-2'-fluoroadenosine-3'-phosphate
  modified_base 6: mod_base = OTHER; note = 2'-O-methyladenosine-3'-phosphate
  modified_base 7: mod_base = OTHER; note = 2'-deoxy-2'-fluoroadenosine-3'-phosphate
  modified_base 8: mod_base = OTHER; note = 2'-O-methyladenosine-3'-phosphate
  modified_base 9: mod_base = OTHER; note = 2'-deoxy-2'-fluorouridine-3'-phosphate
  modified_base 10: mod_base = OTHER; note = 2'-deoxy-2'-fluoroadenosine-3'-phosphate
  modified_base 11: mod_base = OTHER; note = 2'-deoxy-2'-fluoroadenosine-3'-phosphate
  modified_base 12: mod_base = OTHER; note = 2'-O-methylcytidine-3'-phosphate
  modified_base 13: mod_base = OTHER; note = 2'-deoxy-2'-fluorouridine-3'-phosphate
  modified_base 14: mod_base = OTHER; note = 2'-O-methylcytidine-3'-phosphate
  modified_base 15: mod_base = OTHER; note = 2'-deoxy-2'-fluoroadenosine-3'-phosphate
  modified_base 16: mod_base = OTHER; note = 2'-O-methylcytidine-3'-phosphate
  modified_base 17: mod_base = OTHER; note = 2'-deoxy-2'-fluorouridine-3'-phosphate
  modified_base 18: mod_base = OTHER; note = 2'-O-methyladenosine-3'-phosphate
  modified_base 19: mod_base = OTHER; note = 2'-deoxy-2'-fluorouridine-3'-phosphate
  modified_base 20: mod_base = OTHER; note = 2'-O-methyladenosine-3'-phosphate
  modified_base 21: mod_base = OTHER; note = 2'-deoxy-2'-fluoroadenosine-3'-phosphate ((2S,4R)-1-[29-[[2-(acetylamino)-2-deoxy-beta-D-galactopyra nosyl]oxy]-14,14-bis[[3-[[3-[[5-[[2-(acetylamino)-2-deoxy-b eta-D-galactopyranosyl]oxy]-1-oxopentyl]amino]propyl]amino] -3-oxopropoxy]methyl]-1,12,19,25-tetraoxo-16-oxa-13,20,24-t riazanonacos-1-yl]-4-hydroxy-2-pyrrolidinyl)methyl ester
tgacaaaataactcactataa

SEQ ID NO: 72 - RNA, 23 nt, synthetic construct
  source 1..23: mol_type = other RNA
  modified_base 1: mod_base = OTHER; note = 2'-O-methyluridine-3'-phosphorothioate
  modified_base 2: mod_base = OTHER; note = 2'-deoxy-2'-fluorouridine-3'-phosphorothioate
  modified_base 3: mod_base = OTHER; note = 2'-O-methyladenosine-3'-phosphate
  modified_base 4: mod_base = OTHER; note = 2'-deoxy-2'-fluorouridine-3'-phosphate
  modified_base 5: mod_base = OTHER; note = 2'-O-methyladenosine-3'-phosphate
  modified_base 6: mod_base = OTHER; note = 2'-deoxy-2'-fluoroguanosine-3'-phosphate
  modified_base 7: mod_base = OTHER; note = 2'-O-methyluridine-3'-phosphate
  modified_base 8: mod_base = OTHER; note = 2'-deoxy-2'-fluoroguanosine-3'-phosphate
  modified_base 9: mod_base = OTHER; note = 2'-O-methyladenosine-3'-phosphate
  modified_base 10: mod_base = OTHER; note = 2'-deoxy-2'-fluoroguanosine-3'-phosphate
  modified_base 11: mod_base = OTHER; note = 2'-O-methyluridine-3'-phosphate
  modified_base 12: mod_base = OTHER; note = 2'-O-methyluridine-3'-phosphate
  modified_base 13: mod_base = OTHER; note = 2'-O-methyladenosine-3'-phosphate
  modified_base 14: mod_base = OTHER; note = 2'-deoxy-2'-fluorouridine-3'-phosphate
  modified_base 15: mod_base = OTHER; note = 2'-O-methyluridine-3'-phosphate
  modified_base 16: mod_base = OTHER; note = 2'-deoxy-2'-fluorouridine-3'-phosphate
  modified_base 17: mod_base = OTHER; note = 2'-O-methyluridine-3'-phosphate
  modified_base 18: mod_base = OTHER; note = 2'-deoxy-2'-fluoroguanosine-3'-phosphate
  modified_base 19: mod_base = OTHER; note = 2'-O-methyluridine-3'-phosphate
  modified_base 20: mod_base = OTHER; note = 2'-deoxy-2'-fluorocytidine-3'-phosphate
  modified_base 21: mod_base = OTHER; note = 2'-O-methyladenosine-3'-phosphorothioate
  modified_base 22: mod_base = OTHER; note = 2'-O-methyladenosine-3'-phosphorothioate
  modified_base 23: mod_base = OTHER; note = 2'-O-methyluridine
ttatagtgagttattttgtcaat

SEQ ID NO: 73 - RNA, 21 nt, synthetic construct
  source 1..21: mol_type = other RNA
  modified_base 1: mod_base = OTHER; note = 2'-deoxy-2'-fluorouridine-3'-phosphorothioate
  modified_base 2: mod_base = OTHER; note = 2'-O-methylguanosine-3'-phosphorothioate
  modified_base 3: mod_base = OTHER; note = 2'-deoxy-2'-fluoroadenosine-3'-phosphate
  modified_base 4: mod_base = OTHER; note = 2'-O-methylcytidine-3'-phosphate
  modified_base 5: mod_base = OTHER; note = 2'-deoxy-2'-fluoroadenosine-3'-phosphate
  modified_base 6: mod_base = OTHER; note = 2'-O-methyladenosine-3'-phosphate
  modified_base 7: mod_base = OTHER; note = 2'-deoxy-2'-fluoroadenosine-3'-phosphate
  modified_base 8: mod_base = OTHER; note = 2'-O-methyladenosine-3'-phosphate
  modified_base 9: mod_base = OTHER; note = 2'-deoxy-2'-fluorouridine-3'-phosphate
  modified_base 10: mod_base = OTHER; note = 2'-deoxy-2'-fluoroadenosine-3'-phosphate
  modified_base 11: mod_base = OTHER; note = 2'-deoxy-2'-fluoroadenosine-3'-phosphate
  modified_base 12: mod_base = OTHER; note = 2'-O-methylcytidine-3'-phosphate
  modified_base 13: mod_base = OTHER; note = 2'-deoxy-2'-fluorouridine-3'-phosphate
  modified_base 14: mod_base = OTHER; note = 2'-O-methylcytidine-3'-phosphate
  modified_base 15: mod_base = OTHER; note = 2'-deoxy-2'-fluoroadenosine-3'-phosphate
  modified_base 16: mod_base = OTHER; note = 2'-O-methylcytidine-3'-phosphate
  modified_base 17: mod_base = OTHER; note = 2'-deoxy-2'-fluorouridine-3'-phosphate
  modified_base 18: mod_base = OTHER; note = 2'-O-methyladenosine-3'-phosphate
  modified_base 19: mod_base = OTHER; note = 2'-deoxy-2'-fluorouridine-3'-phosphate
  modified_base 20: mod_base = OTHER; note = 2'-O-methyladenosine-3'-phosphate
  modified_base 21: mod_base = OTHER; note = 2'-deoxy-2'-fluoroadenosine-3'-phosphate ((2S,4R)-1-[29-[[2-(acetylamino)-2-deoxy-beta-D-galactopyra nosyl]oxy]-14,14-bis[[3-[[3-[[5-[[2-(acetylamino)-2-deoxy-b eta-D-galactopyranosyl]oxy]-1-oxopentyl]amino]propyl]amino] -3-oxopropoxy]methyl]-1,12,19,25-tetraoxo-16-oxa-13,20,24-t riazanonacos-1-yl]-4-hydroxy-2-pyrrolidinyl)methyl ester
tgacaaaataactcactataa

SEQ ID NO: 74 - RNA, 23 nt, synthetic construct
  source 1..23: mol_type = other RNA
  modified_base 1: mod_base = OTHER; note = 2'-O-methyluridine-3'-phosphorothioate 5'-phosphate
  modified_base 2: mod_base = OTHER; note = 2'-deoxy-2'-fluorouridine-3'-phosphorothioate
  modified_base 3: mod_base = OTHER; note = 2'-O-methyladenosine-3'-phosphate
  modified_base 4: mod_base = OTHER; note = 2'-deoxy-2'-fluorouridine-3'-phosphate
  modified_base 5: mod_base = OTHER; note = 2'-O-methyladenosine-3'-phosphate
  modified_base 6: mod_base = OTHER; note = 2'-deoxy-2'-fluoroguanosine-3'-phosphate
  modified_base 7: mod_base = OTHER; note = 2'-O-methyluridine-3'-phosphate
  modified_base 8: mod_base = OTHER; note = 2'-deoxy-2'-fluoroguanosine-3'-phosphate
  modified_base 9: mod_base = OTHER; note = 2'-O-methyladenosine-3'-phosphate
  modified_base 10: mod_base = OTHER; note = 2'-deoxy-2'-fluoroguanosine-3'-phosphate
  modified_base 11: mod_base = OTHER; note = 2'-O-methyluridine-3'-phosphate
  modified_base 12: mod_base = OTHER; note = 2'-O-methyluridine-3'-phosphate
  modified_base 13: mod_base = OTHER; note = 2'-O-methyladenosine-3'-phosphate
  modified_base 14: mod_base = OTHER; note = 2'-deoxy-2'-fluorouridine-3'-phosphate
  modified_base 15: mod_base = OTHER; note = 2'-O-methyluridine-3'-phosphate
  modified_base 16: mod_base = OTHER; note = 2'-deoxy-2'-fluorouridine-3'-phosphate
  modified_base 17: mod_base = OTHER; note = 2'-O-methyluridine-3'-phosphate
  modified_base 18: mod_base = OTHER; note = 2'-deoxy-2'-fluoroguanosine-3'-phosphate
  modified_base 19: mod_base = OTHER; note = 2'-O-methyluridine-3'-phosphate
  modified_base 20: mod_base = OTHER; note = 2'-deoxy-2'-fluorocytidine-3'-phosphate
  modified_base 21: mod_base = OTHER; note = 2'-O-methyladenosine-3'-phosphorothioate
  modified_base 22: mod_base = OTHER; note = 2'-O-methyladenosine-3'-phosphorothioate
  modified_base 23: mod_base = OTHER; note = 2'-O-methyluridine
ttatagtgagttattttgtcaat

SEQ ID NO: 75 - RNA, 21 nt, synthetic construct
  source 1..21: mol_type = other RNA
  modified_base 1: mod_base = OTHER; note = 2'-deoxy-2'-fluorouridine-3'-phosphorothioate
  modified_base 2: mod_base = OTHER; note = 2'-O-methylguanosine-3'-phosphorothioate
  modified_base 3: mod_base = OTHER; note = 2'-deoxy-2'-fluoroadenosine-3'-phosphate
  modified_base 4: mod_base = OTHER; note = 2'-O-methylcytidine-3'-phosphate
  modified_base 5: mod_base = OTHER; note = 2'-deoxy-2'-fluoroadenosine-3'-phosphate
  modified_base 6: mod_base = OTHER; note = 2'-O-methyladenosine-3'-phosphate
  modified_base 7: mod_base = OTHER; note = 2'-deoxy-2'-fluoroadenosine-3'-phosphate
  modified_base 8: mod_base = OTHER; note = 2'-O-methyladenosine-3'-phosphate
  modified_base 9: mod_base = OTHER; note = 2'-deoxy-2'-fluorouridine-3'-phosphate
  modified_base 10: mod_base = OTHER; note = 2'-deoxy-2'-fluoroadenosine-3'-phosphate
  modified_base 11: mod_base = OTHER; note = 2'-deoxy-2'-fluoroadenosine-3'-phosphate
  modified_base 12: mod_base = OTHER; note = 2'-O-methylcytidine-3'-phosphate
  modified_base 13: mod_base = OTHER; note = 2'-deoxy-2'-fluorouridine-3'-phosphate
  modified_base 14: mod_base = OTHER; note = 2'-O-methylcytidine-3'-phosphate
  modified_base 15: mod_base = OTHER; note = 2'-deoxy-2'-fluoroadenosine-3'-phosphate
  modified_base 16: mod_base = OTHER; note = 2'-O-methylcytidine-3'-phosphate
  modified_base 17: mod_base = OTHER; note = 2'-deoxy-2'-fluorouridine-3'-phosphate
  modified_base 18: mod_base = OTHER; note = 2'-O-methyladenosine-3'-phosphate
  modified_base 19: mod_base = OTHER; note = 2'-deoxy-2'-fluorouridine-3'-phosphate
  modified_base 20: mod_base = OTHER; note = 2'-O-methyladenosine-3'-phosphate
  modified_base 21: mod_base = OTHER; note = 2'-deoxy-2'-fluoroadenosine-3'-phosphate ((2S,4R)-1-[29-[[2-(acetylamino)-2-deoxy-beta-D-galactopyra nosyl]oxy]-14,14-bis[[3-[[3-[[5-[[2-(acetylamino)-2-deoxy-b eta-D-galactopyranosyl]oxy]-1-oxopentyl]amino]propyl]amino] -3-oxopropoxy]methyl]-1,12,19,25-tetraoxo-16-oxa-13,20,24-t riazanonacos-1-yl]-4-hydroxy-2-pyrrolidinyl)methyl ester
tgacaaaataactcactataa

SEQ ID NO: 76 - RNA, 23 nt, synthetic construct
  source 1..23: mol_type = other RNA
  modified_base 1: mod_base = OTHER; note = 1-(alpha-L-threofuranosyl)thymine 2'-phosphorothioate
  modified_base 2: mod_base = OTHER; note = 2'-deoxy-2'-fluorouridine-3'-phosphorothioate
  modified_base 3: mod_base = OTHER; note = 2'-O-methyladenosine-3'-phosphate
  modified_base 4: mod_base = OTHER; note = 2'-deoxy-2'-fluorouridine-3'-phosphate
  modified_base 5: mod_base = OTHER; note = 2'-O-methyladenosine-3'-phosphate
  modified_base 6: mod_base = OTHER; note = 2'-deoxy-2'-fluoroguanosine-3'-phosphate
  modified_base 7: mod_base = OTHER; note = 2'-O-methyluridine-3'-phosphate
  modified_base 8: mod_base = OTHER; note = 2'-deoxy-2'-fluoroguanosine-3'-phosphate
  modified_base 9: mod_base = OTHER; note = 2'-O-methyladenosine-3'-phosphate
  modified_base 10: mod_base = OTHER; note = 2'-deoxy-2'-fluoroguanosine-3'-phosphate
  modified_base 11: mod_base = OTHER; note = 2'-O-methyluridine-3'-phosphate
  modified_base 12: mod_base = OTHER; note = 2'-O-methyluridine-3'-phosphate
  modified_base 13: mod_base = OTHER; note = 2'-O-methyladenosine-3'-phosphate
  modified_base 14: mod_base = OTHER; note = 2'-deoxy-2'-fluorouridine-3'-phosphate
  modified_base 15: mod_base = OTHER; note = 2'-O-methyluridine-3'-phosphate
  modified_base 16: mod_base = OTHER; note = 2'-deoxy-2'-fluorouridine-3'-phosphate
  modified_base 17: mod_base = OTHER; note = 2'-O-methyluridine-3'-phosphate
  modified_base 18: mod_base = OTHER; note = 2'-deoxy-2'-fluoroguanosine-3'-phosphate
  modified_base 19: mod_base = OTHER; note = 2'-O-methyluridine-3'-phosphate
  modified_base 20: mod_base = OTHER; note = 2'-deoxy-2'-fluorocytidine-3'-phosphate
  modified_base 21: mod_base = OTHER; note = 2'-O-methyladenosine-3'-phosphorothioate
  modified_base 22: mod_base = OTHER; note = 2'-O-methyladenosine-3'-phosphorothioate
  modified_base 23: mod_base = OTHER; note = 2'-O-methyluridine
ttatagtgagttattttgtcaat

SEQ ID NO: 77 - RNA, 21 nt, synthetic construct
  source 1..21: mol_type = other RNA
  modified_base 1: mod_base = OTHER; note = 2'-deoxy-2'-fluorouridine-3'-phosphorothioate
  modified_base 2: mod_base = OTHER; note = 2'-O-methylguanosine-3'-phosphorothioate
  modified_base 3: mod_base = OTHER; note = 2'-deoxy-2'-fluoroadenosine-3'-phosphate
  modified_base 4: mod_base = OTHER; note = 2'-O-methylcytidine-3'-phosphate
  modified_base 5: mod_base = OTHER; note = 2'-deoxy-2'-fluoroadenosine-3'-phosphate
  modified_base 6: mod_base = OTHER; note = 2'-O-methyladenosine-3'-phosphate
  modified_base 7: mod_base = OTHER; note = 2'-deoxy-2'-fluoroadenosine-3'-phosphate
  modified_base 8: mod_base = OTHER; note = 2'-O-methyladenosine-3'-phosphate
  modified_base 9: mod_base = OTHER; note = 2'-deoxy-2'-fluorouridine-3'-phosphate
  modified_base 10: mod_base = OTHER; note = 2'-deoxy-2'-fluoroadenosine-3'-phosphate
  modified_base 11: mod_base = OTHER; note = 2'-deoxy-2'-fluoroadenosine-3'-phosphate
  modified_base 12: mod_base = OTHER; note = 2'-O-methylcytidine-3'-phosphate
  modified_base 13: mod_base = OTHER; note = 2'-deoxy-2'-fluorouridine-3'-phosphate
  modified_base 14: mod_base = OTHER; note = 2'-O-methylcytidine-3'-phosphate
  modified_base 15: mod_base = OTHER; note = 2'-deoxy-2'-fluoroadenosine-3'-phosphate
  modified_base 16: mod_base = OTHER; note = 2'-O-methylcytidine-3'-phosphate
  modified_base 17: mod_base = OTHER; note = 2'-deoxy-2'-fluorouridine-3'-phosphate
  modified_base 18: mod_base = OTHER; note = 2'-O-methyladenosine-3'-phosphate
  modified_base 19: mod_base = OTHER; note = 2'-deoxy-2'-fluorouridine-3'-phosphate
  modified_base 20: mod_base = OTHER; note = 2'-O-methyladenosine-3'-phosphate
  modified_base 21: mod_base = OTHER; note = 2'-deoxy-2'-fluoroadenosine-3'-phosphate ((2S,4R)-1-[29-[[2-(acetylamino)-2-deoxy-beta-D-galactopyra nosyl]oxy]-14,14-bis[[3-[[3-[[5-[[2-(acetylamino)-2-deoxy-b eta-D-galactopyranosyl]oxy]-1-oxopentyl]amino]propyl]amino] -3-oxopropoxy]methyl]-1,12,19,25-tetraoxo-16-oxa-13,20,24-t riazanonacos-1-yl]-4-hydroxy-2-pyrrolidinyl)methyl ester
tgacaaaataactcactataa

SEQ ID NO: 78 - RNA, 23 nt, synthetic construct
  source 1..23: mol_type = other RNA
  modified_base 1: mod_base = OTHER; note = 1-(alpha-L-threofuranosyl)thymine 2'-phosphorothioate-3'-phosphate
  modified_base 2: mod_base = OTHER; note = 2'-deoxy-2'-fluorouridine-3'-phosphorothioate
  modified_base 3: mod_base = OTHER; note = 2'-O-methyladenosine-3'-phosphate
  modified_base 4: mod_base = OTHER; note = 2'-deoxy-2'-fluorouridine-3'-phosphate
  modified_base 5: mod_base = OTHER; note = 2'-O-methyladenosine-3'-phosphate
  modified_base 6: mod_base = OTHER; note = 2'-deoxy-2'-fluoroguanosine-3'-phosphate
  modified_base 7: mod_base = OTHER; note = 2'-O-methyluridine-3'-phosphate
  modified_base 8: mod_base = OTHER; note = 2'-deoxy-2'-fluoroguanosine-3'-phosphate
  modified_base 9: mod_base = OTHER; note = 2'-O-methyladenosine-3'-phosphate
  modified_base 10: mod_base = OTHER; note = 2'-deoxy-2'-fluoroguanosine-3'-phosphate
  modified_base 11: mod_base = OTHER; note = 2'-O-methyluridine-3'-phosphate
  modified_base 12: mod_base = OTHER; note = 2'-O-methyluridine-3'-phosphate
  modified_base 13: mod_base = OTHER; note = 2'-O-methyladenosine-3'-phosphate
  modified_base 14: mod_base = OTHER; note = 2'-deoxy-2'-fluorouridine-3'-phosphate
  modified_base 15: mod_base = OTHER; note = 2'-O-methyluridine-3'-phosphate
  modified_base 16: mod_base = OTHER; note = 2'-deoxy-2'-fluorouridine-3'-phosphate
  modified_base 17: mod_base = OTHER; note = 2'-O-methyluridine-3'-phosphate
  modified_base 18: mod_base = OTHER; note = 2'-deoxy-2'-fluoroguanosine-3'-phosphate
  modified_base 19: mod_base = OTHER; note = 2'-O-methyluridine-3'-phosphate
  modified_base 20: mod_base = OTHER; note = 2'-deoxy-2'-fluorocytidine-3'-phosphate
  modified_base 21: mod_base = OTHER; note = 2'-O-methyladenosine-3'-phosphorothioate
  modified_base 22: mod_base = OTHER; note = 2'-O-methyladenosine-3'-phosphorothioate
  modified_base 23: mod_base = OTHER; note = 2'-O-methyluridine
ttatagtgagttattttgtcaat

SEQ ID NO: 79 - RNA, 21 nt, synthetic construct
  source 1..21: mol_type = other RNA
  modified_base 1: mod_base = OTHER; note = 2'-deoxy-2'-fluorouridine-3'-phosphorothioate
  modified_base 2: mod_base = OTHER; note = 2'-O-methyladenosine-3'-phosphorothioate
  modified_base 3: mod_base = OTHER; note = 2'-deoxy-2'-fluorocytidine-3'-phosphate
  modified_base 4: mod_base = OTHER; note = 2'-O-methyluridine-3'-phosphate
  modified_base 5: mod_base = OTHER; note = 2'-deoxy-2'-fluoroguanosine-3'-phosphate
  modified_base 6: mod_base = OTHER; note = 2'-O-methyluridine-3'-phosphate
  modified_base 7: mod_base = OTHER; note = 2'-deoxy-2'-fluorouridine-3'-phosphate
  modified_base 8: mod_base = OTHER; note = 2'-O-methylguanosine-3'-phosphate
  modified_base 9: mod_base = OTHER; note = 2'-deoxy-2'-fluoroguanosine-3'-phosphate
  modified_base 10: mod_base = OTHER; note = 2'-deoxy-2'-fluoroadenosine-3'-phosphate
  modified_base 11: mod_base = OTHER; note = 2'-deoxy-2'-fluorouridine-3'-phosphate
  modified_base 12: mod_base = OTHER; note = 2'-O-methyluridine-3'-phosphate
  modified_base 13: mod_base = OTHER; note = 2'-deoxy-2'-fluoroguanosine-3'-phosphate
  modified_base 14: mod_base = OTHER; note = 2'-O-methyladenosine-3'-phosphate
  modified_base 15: mod_base = OTHER; note = 2'-deoxy-2'-fluorouridine-3'-phosphate
  modified_base 16: mod_base = OTHER; note = 2'-O-methyluridine-3'-phosphate
  modified_base 17: mod_base = OTHER; note = 2'-deoxy-2'-fluorocytidine-3'-phosphate
  modified_base 18: mod_base = OTHER; note = 2'-O-methylguanosine-3'-phosphate
  modified_base 19: mod_base = OTHER; note = 2'-deoxy-2'-fluoroadenosine-3'-phosphate
  modified_base 20: mod_base = OTHER; note = 2'-O-methyladenosine-3'-phosphate
  modified_base 21: mod_base = OTHER; note = 2'-deoxy-2'-fluoroadenosine-3'-phosphate (N-(1-oxo-6-((3beta-cholest-5-en-3-yl)oxcarboxamido)hexyl)- 4-hydroxypyrrolidin-2-yl)methyl ester
tactgttggattgattcgaaa

SEQ ID NO: 80 - RNA, 23 nt, synthetic construct
  source 1..23: mol_type = other RNA
  modified_base 1: mod_base = OTHER; note = 2'-O-methyluridine-3'-phosphorothioate 5'-(E)-Vinylphosphonate
  modified_base 2: mod_base = OTHER; note = 2'-deoxy-2'-fluorouridine-3'-phosphorothioate
  modified_base 3: mod_base = OTHER; note = 2'-O-methyluridine-3'-phosphate
  modified_base 4: mod_base = OTHER; note = 2'-deoxy-2'-fluorocytidine-3'-phosphate
  modified_base 5: mod_base = OTHER; note = 2'-O-methylguanosine-3'-phosphate
  modified_base 6: mod_base = OTHER; note = 2'-deoxy-2'-fluoroadenosine-3'-phosphate
  modified_base 7: mod_base = OTHER; note = 2'-O-methyladenosine-3'-phosphate
  modified_base 8: mod_base = OTHER; note = 2'-deoxy-2'-fluorouridine-3'-phosphate
  modified_base 9: mod_base = OTHER; note = 2'-O-methylcytidine-3'-phosphate
  modified_base 10: mod_base = OTHER; note = 2'-deoxy-2'-fluoroadenosine-3'-phosphate
  modified_base 11: mod_base = OTHER; note = 2'-O-methyladenosine-3'-phosphate
  modified_base 12: mod_base = OTHER; note = 2'-O-methyluridine-3'-phosphate
  modified_base 13: mod_base = OTHER; note = 2'-O-methylcytidine-3'-phosphate
  modified_base 14: mod_base = OTHER; note = 2'-deoxy-2'-fluorocytidine-3'-phosphate
  modified_base 15: mod_base = OTHER; note = 2'-O-methyladenosine-3'-phosphate
  modified_base 16: mod_base = OTHER; note = 2'-deoxy-2'-fluoroadenosine-3'-phosphate
  modified_base 17: mod_base = OTHER; note = 2'-O-methylcytidine-3'-phosphate
  modified_base 18: mod_base = OTHER; note = 2'-deoxy-2'-fluoroadenosine-3'-phosphate
  modified_base 19: mod_base = OTHER; note = 2'-O-methylguanosine-3'-phosphate
  modified_base 20: mod_base = OTHER; note = 2'-deoxy-2'-fluorouridine-3'-phosphate
  modified_base 21: mod_base = OTHER; note = 2'-O-methyladenosine-3'-phosphorothioate
  modified_base 22: mod_base = OTHER; note = 2'-O-methylguanosine-3'-phosphorothioate
  modified_base 23: mod_base = OTHER; note = 2'-O-methylcytidine
tttcgaatcaatccaacagtagc

SEQ ID NO: 81 - RNA, 21 nt, synthetic construct
  source 1..21: mol_type = other RNA
  modified_base 1: mod_base = OTHER; note = 2'-deoxy-2'-fluorouridine-3'-phosphorothioate
  modified_base 2: mod_base = OTHER; note = 2'-O-methyladenosine-3'-phosphorothioate
  modified_base 3: mod_base = OTHER; note = 2'-deoxy-2'-fluorocytidine-3'-phosphate
  modified_base 4: mod_base = OTHER; note = 2'-O-methyluridine-3'-phosphate
  modified_base 5: mod_base = OTHER; note = 2'-deoxy-2'-fluoroguanosine-3'-phosphate
  modified_base 6: mod_base = OTHER; note = 2'-O-methyluridine-3'-phosphate
  modified_base 7: mod_base = OTHER; note = 2'-deoxy-2'-fluorouridine-3'-phosphate
  modified_base 8: mod_base = OTHER; note = 2'-O-methylguanosine-3'-phosphate
  modified_base 9: mod_base = OTHER; note = 2'-deoxy-2'-fluoroguanosine-3'-phosphate
  modified_base 10: mod_base = OTHER; note = 2'-deoxy-2'-fluoroadenosine-3'-phosphate
  modified_base 11: mod_base = OTHER; note = 2'-deoxy-2'-fluorouridine-3'-phosphate
  modified_base 12: mod_base = OTHER; note = 2'-O-methyluridine-3'-phosphate
  modified_base 13: mod_base = OTHER; note = 2'-deoxy-2'-fluoroguanosine-3'-phosphate
  modified_base 14: mod_base = OTHER; note = 2'-O-methyladenosine-3'-phosphate
  modified_base 15: mod_base = OTHER; note = 2'-deoxy-2'-fluorouridine-3'-phosphate
  modified_base 16: mod_base = OTHER; note = 2'-O-methyluridine-3'-phosphate
  modified_base 17: mod_base = OTHER; note = 2'-deoxy-2'-fluorocytidine-3'-phosphate
  modified_base 18: mod_base = OTHER; note = 2'-O-methylguanosine-3'-phosphate
  modified_base 19: mod_base = OTHER; note = 2'-deoxy-2'-fluoroadenosine-3'-phosphate
  modified_base 20: mod_base = OTHER; note = 2'-O-methyladenosine-3'-phosphate
  modified_base 21: mod_base = OTHER; note = 2'-deoxy-2'-fluoroadenosine-3'-phosphate (N-(1-oxo-6-((3beta-cholest-5-en-3-yl)oxcarboxamido)hexyl)- 4-hydroxypyrrolidin-2-yl)methyl ester
tactgttggattgattcgaaa

SEQ ID NO: 82 - RNA, 23 nt, synthetic construct
  source 1..23: mol_type = other RNA
  modified_base 1: mod_base = OTHER; note = 2'-O-methyluridine-3'-phosphorothioate 5'-phosphate
  modified_base 2: mod_base = OTHER; note = 2'-deoxy-2'-fluorouridine-3'-phosphorothioate
  modified_base 3: mod_base = OTHER; note = 2'-O-methyluridine-3'-phosphate
  modified_base 4: mod_base = OTHER; note = 2'-deoxy-2'-fluorocytidine-3'-phosphate
  modified_base 5: mod_base = OTHER; note = 2'-O-methylguanosine-3'-phosphate
  modified_base 6: mod_base = OTHER; note = 2'-deoxy-2'-fluoroadenosine-3'-phosphate
  modified_base 7: mod_base = OTHER; note = 2'-O-methyladenosine-3'-phosphate
  modified_base 8: mod_base = OTHER; note = 2'-deoxy-2'-fluorouridine-3'-phosphate
  modified_base 9: mod_base = OTHER; note = 2'-O-methylcytidine-3'-phosphate
  modified_base 10: mod_base = OTHER; note = 2'-deoxy-2'-fluoroadenosine-3'-phosphate
  modified_base 11: mod_base = OTHER; note = 2'-O-methyladenosine-3'-phosphate
  modified_base 12: mod_base = OTHER; note = 2'-O-methyluridine-3'-phosphate
  modified_base 13: mod_base = OTHER; note = 2'-O-methylcytidine-3'-phosphate
  modified_base 14: mod_base = OTHER; note = 2'-deoxy-2'-fluorocytidine-3'-phosphate
  modified_base 15: mod_base = OTHER; note = 2'-O-methyladenosine-3'-phosphate
  modified_base 16: mod_base = OTHER; note = 2'-deoxy-2'-fluoroadenosine-3'-phosphate
  modified_base 17: mod_base = OTHER; note = 2'-O-methylcytidine-3'-phosphate
  modified_base 18: mod_base = OTHER; note = 2'-deoxy-2'-fluoroadenosine-3'-phosphate
  modified_base 19: mod_base = OTHER; note = 2'-O-methylguanosine-3'-phosphate
  modified_base 20: mod_base = OTHER; note = 2'-deoxy-2'-fluorouridine-3'-phosphate
  modified_base 21: mod_base = OTHER; note = 2'-O-methyladenosine-3'-phosphorothioate
  modified_base 22: mod_base = OTHER; note = 2'-O-methylguanosine-3'-phosphorothioate
  modified_base 23: mod_base = OTHER; note = 2'-O-methylcytidine
tttcgaatcaatccaacagtagc

SEQ ID NO: 83 - RNA, 21 nt, synthetic construct
  source 1..21: mol_type = other RNA
  modified_base 1: mod_base = OTHER; note = 2'-deoxy-2'-fluorouridine-3'-phosphorothioate
  modified_base 2: mod_base = OTHER; note = 2'-O-methyladenosine-3'-phosphorothioate
  modified_base 3: mod_base = OTHER; note = 2'-deoxy-2'-fluorocytidine-3'-phosphate
  modified_base 4: mod_base = OTHER; note = 2'-O-methyluridine-3'-phosphate
  modified_base 5: mod_base = OTHER; note = 2'-deoxy-2'-fluoroguanosine-3'-phosphate
  modified_base 6: mod_base = OTHER; note = 2'-O-methyluridine-3'-phosphate
  modified_base 7: mod_base = OTHER; note = 2'-deoxy-2'-fluorouridine-3'-phosphate
  modified_base 8: mod_base = OTHER; note = 2'-O-methylguanosine-3'-phosphate
  modified_base 9: mod_base = OTHER; note = 2'-deoxy-2'-fluoroguanosine-3'-phosphate
  modified_base 10: mod_base = OTHER; note = 2'-deoxy-2'-fluoroadenosine-3'-phosphate
  modified_base 11: mod_base = OTHER; note = 2'-deoxy-2'-fluorouridine-3'-phosphate
  modified_base 12: mod_base = OTHER; note = 2'-O-methyluridine-3'-phosphate
  modified_base 13: mod_base = OTHER; note = 2'-deoxy-2'-fluoroguanosine-3'-phosphate
  modified_base 14: mod_base = OTHER; note = 2'-O-methyladenosine-3'-phosphate
  modified_base 15: mod_base = OTHER; note = 2'-deoxy-2'-fluorouridine-3'-phosphate
  modified_base 16: mod_base = OTHER; note = 2'-O-methyluridine-3'-phosphate
  modified_base 17: mod_base = OTHER; note = 2'-deoxy-2'-fluorocytidine-3'-phosphate
  modified_base 18: mod_base = OTHER; note = 2'-O-methylguanosine-3'-phosphate
  modified_base 19: mod_base = OTHER; note = 2'-deoxy-2'-fluoroadenosine-3'-phosphate
  modified_base 20: mod_base = OTHER; note = 2'-O-methyladenosine-3'-phosphate
  modified_base 21: mod_base = OTHER; note = 2'-deoxy-2'-fluoroadenosine-3'-phosphate (N-(1-oxo-6-((3beta-cholest-5-en-3-yl)oxcarboxamido)hexyl)- 4-hydroxypyrrolidin-2-yl)methyl ester
tactgttggattgattcgaaa

SEQ ID NO: 84 - RNA, 23 nt, synthetic construct
  source 1..23: mol_type = other RNA
  modified_base 1: mod_base = OTHER; note = 1-(alpha-L-threofuranosyl)thymine 2'-phosphorothioate
  modified_base 2: mod_base = OTHER; note = 2'-deoxy-2'-fluorouridine-3'-phosphorothioate
  modified_base 3: mod_base = OTHER; note = 2'-O-methyluridine-3'-phosphate
  modified_base 4: mod_base = OTHER; note = 2'-deoxy-2'-fluorocytidine-3'-phosphate
  modified_base 5: mod_base = OTHER; note = 2'-O-methylguanosine-3'-phosphate
  modified_base 6: mod_base = OTHER; note = 2'-deoxy-2'-fluoroadenosine-3'-phosphate
  modified_base 7: mod_base = OTHER; note = 2'-O-methyladenosine-3'-phosphate
  modified_base 8: mod_base = OTHER; note = 2'-deoxy-2'-fluorouridine-3'-phosphate
  modified_base 9: mod_base = OTHER; note = 2'-O-methylcytidine-3'-phosphate
  modified_base 10: mod_base = OTHER; note = 2'-deoxy-2'-fluoroadenosine-3'-phosphate
  modified_base 11: mod_base = OTHER; note = 2'-O-methyladenosine-3'-phosphate
  modified_base 12: mod_base = OTHER; note = 2'-O-methyluridine-3'-phosphate
  modified_base 13: mod_base = OTHER; note = 2'-O-methylcytidine-3'-phosphate
  modified_base 14: mod_base = OTHER; note = 2'-deoxy-2'-fluorocytidine-3'-phosphate
  modified_base 15: mod_base = OTHER; note = 2'-O-methyladenosine-3'-phosphate
  modified_base 16: mod_base = OTHER; note = 2'-deoxy-2'-fluoroadenosine-3'-phosphate
  modified_base 17: mod_base = OTHER; note = 2'-O-methylcytidine-3'-phosphate
  modified_base 18: mod_base = OTHER; note = 2'-deoxy-2'-fluoroadenosine-3'-phosphate
  modified_base 19: mod_base = OTHER; note = 2'-O-methylguanosine-3'-phosphate
  modified_base 20: mod_base = OTHER; note = 2'-deoxy-2'-fluorouridine-3'-phosphate
  modified_base 21: mod_base = OTHER; note = 2'-O-methyladenosine-3'-phosphorothioate
  modified_base 22: mod_base = OTHER; note = 2'-O-methylguanosine-3'-phosphorothioate
  modified_base 23: mod_base = OTHER; note = 2'-O-methylcytidine
tttcgaatcaatccaacagtagc

SEQ ID NO: 85 - RNA, 21 nt, synthetic construct
  source 1..21: mol_type = other RNA
  modified_base 1: mod_base = OTHER; note = 2'-deoxy-2'-fluorouridine-3'-phosphorothioate
  modified_base 2: mod_base = OTHER; note = 2'-O-methyladenosine-3'-phosphorothioate
  modified_base 3: mod_base = OTHER; note = 2'-deoxy-2'-fluorocytidine-3'-phosphate
  modified_base 4: mod_base = OTHER; note = 2'-O-methyluridine-3'-phosphate
  modified_base 5: mod_base = OTHER; note = 2'-deoxy-2'-fluoroguanosine-3'-phosphate
  modified_base 6: mod_base = OTHER; note = 2'-O-methyluridine-3'-phosphate
  modified_base 7: mod_base = OTHER; note = 2'-deoxy-2'-fluorouridine-3'-phosphate
  modified_base 8: mod_base = OTHER; note = 2'-O-methylguanosine-3'-phosphate
  modified_base 9: mod_base = OTHER; note = 2'-deoxy-2'-fluoroguanosine-3'-phosphate
  modified_base 10: mod_base = OTHER; note = 2'-deoxy-2'-fluoroadenosine-3'-phosphate
  modified_base 11: mod_base = OTHER; note = 2'-deoxy-2'-fluorouridine-3'-phosphate
  modified_base 12: mod_base = OTHER; note = 2'-O-methyluridine-3'-phosphate
  modified_base 13: mod_base = OTHER; note = 2'-deoxy-2'-fluoroguanosine-3'-phosphate
  modified_base 14: mod_base = OTHER; note = 2'-O-methyladenosine-3'-phosphate
  modified_base 15: mod_base = OTHER; note = 2'-deoxy-2'-fluorouridine-3'-phosphate
  modified_base 16: mod_base = OTHER; note = 2'-O-methyluridine-3'-phosphate
  modified_base 17: mod_base = OTHER; note = 2'-deoxy-2'-fluorocytidine-3'-phosphate
  modified_base 18: mod_base = OTHER; note = 2'-O-methylguanosine-3'-phosphate
  modified_base 19: mod_base = OTHER; note = 2'-deoxy-2'-fluoroadenosine-3'-phosphate
  modified_base 20: mod_base = OTHER; note = 2'-O-methyladenosine-3'-phosphate
  modified_base 21: mod_base = OTHER; note = 2'-deoxy-2'-fluoroadenosine-3'-phosphate (N-(1-oxo-6-((3beta-cholest-5-en-3-yl)oxcarboxamido)hexyl)- 4-hydroxypyrrolidin-2-yl)methyl ester
tactgttggattgattcgaaa

SEQ ID NO: 86 - RNA, 23 nt, synthetic construct
  source 1..23: mol_type = other RNA
  modified_base 1: mod_base = OTHER; note = 1-(alpha-L-threofuranosyl)thymine 2'-phosphorothioate-3'-phosphate
  modified_base 2: mod_base = OTHER; note = 2'-deoxy-2'-fluorouridine-3'-phosphorothioate
  modified_base 3: mod_base = OTHER; note = 2'-O-methyluridine-3'-phosphate
  modified_base 4: mod_base = OTHER; note = 2'-deoxy-2'-fluorocytidine-3'-phosphate
  modified_base 5: mod_base = OTHER; note = 2'-O-methylguanosine-3'-phosphate
  modified_base 6: mod_base = OTHER; note = 2'-deoxy-2'-fluoroadenosine-3'-phosphate
  modified_base 7: mod_base = OTHER; note = 2'-O-methyladenosine-3'-phosphate
  modified_base 8: mod_base = OTHER; note = 2'-deoxy-2'-fluorouridine-3'-phosphate
  modified_base 9: mod_base = OTHER; note = 2'-O-methylcytidine-3'-phosphate
  modified_base 10: mod_base = OTHER; note = 2'-deoxy-2'-fluoroadenosine-3'-phosphate
  modified_base 11: mod_base = OTHER; note = 2'-O-methyladenosine-3'-phosphate
  modified_base 12: mod_base = OTHER; note = 2'-O-methyluridine-3'-phosphate
  modified_base 13: mod_base = OTHER; note = 2'-O-methylcytidine-3'-phosphate
  modified_base 14: mod_base = OTHER; note = 2'-deoxy-2'-fluorocytidine-3'-phosphate
  modified_base 15: mod_base = OTHER; note = 2'-O-methyladenosine-3'-phosphate
  modified_base 16: mod_base = OTHER; note = 2'-deoxy-2'-fluoroadenosine-3'-phosphate
  modified_base 17: mod_base = OTHER; note = 2'-O-methylcytidine-3'-phosphate
  modified_base 18: mod_base = OTHER; note = 2'-deoxy-2'-fluoroadenosine-3'-phosphate
  modified_base 19: mod_base = OTHER; note = 2'-O-methylguanosine-3'-phosphate
  modified_base 20: mod_base = OTHER; note = 2'-deoxy-2'-fluorouridine-3'-phosphate
  modified_base 21: mod_base = OTHER; note = 2'-O-methyladenosine-3'-phosphorothioate
  modified_base 22: mod_base = OTHER; note = 2'-O-methylguanosine-3'-phosphorothioate
  modified_base 23: mod_base = OTHER; note = 2'-O-methylcytidine
tttcgaatcaatccaacagtagc

SEQ ID NO: 87 - RNA, 21 nt, synthetic construct
  source 1..21: mol_type = other RNA
  modified_base 1: mod_base = OTHER; note = 2'-O-methyluridine-3'-phosphorothioate
  modified_base 2: mod_base = OTHER; note = 2'-O-methyladenosine-3'-phosphorothioate
  modified_base 3: mod_base = OTHER; note = 2'-O-methylcytidine-3'-phosphate
  modified_base 4: mod_base = OTHER; note = 2'-O-methyluridine-3'-phosphate
  modified_base 5: mod_base = OTHER; note = 2'-O-methylguanosine-3'-phosphate
  modified_base 6: mod_base = OTHER; note = 2'-O-hexadecyl-uridine-3'-phosphate
  modified_base 7: mod_base = OTHER; note = 2'-deoxy-2'-fluorouridine-3'-phosphate
  modified_base 8: mod_base = OTHER; note = 2'-O-methylguanosine-3'-phosphate
  modified_base 9: mod_base = OTHER; note = 2'-deoxy-2'-fluoroguanosine-3'-phosphate
  modified_base 10: mod_base = OTHER; note = 2'-deoxy-2'-fluoroadenosine-3'-phosphate
  modified_base 11: mod_base = OTHER; note = 2'-deoxy-2'-fluorouridine-3'-phosphate
  modified_base 12: mod_base = OTHER; note = 2'-O-methyluridine-3'-phosphate
  modified_base 13: mod_base = OTHER; note = 2'-O-methylguanosine-3'-phosphate
  modified_base 14: mod_base = OTHER; note = 2'-O-methyladenosine-3'-phosphate
  modified_base 15: mod_base = OTHER; note = 2'-O-methyluridine-3'-phosphate
  modified_base 16: mod_base = OTHER; note = 2'-O-methyluridine-3'-phosphate
  modified_base 17: mod_base = OTHER; note = 2'-O-methylcytidine-3'-phosphate
  modified_base 18: mod_base = OTHER; note = 2'-O-methylguanosine-3'-phosphate
  modified_base 19: mod_base = OTHER; note = 2'-O-methyladenosine-3'-phosphorothioate
  modified_base 20: mod_base = OTHER; note = 2'-O-methyladenosine-3'-phosphorothioate
  modified_base 21: mod_base = OTHER; note = 2'-O-methyladenosine
tactgttggattgattcgaaa

SEQ ID NO: 88 - RNA, 23 nt, synthetic construct
  source 1..23: mol_type = other RNA
  modified_base 1: mod_base = OTHER; note = 2'-O-methyluridine-3'-phosphorothioate 5'-(E)-Vinylphosphonate
  modified_base 2: mod_base = OTHER; note = 2'-deoxy-2'-fluorouridine-3'-phosphorothioate
  modified_base 3: mod_base = OTHER; note = 2'-O-methyluridine-3'-phosphate
  modified_base 4: mod_base = OTHER; note = 2'-O-methylcytidine-3'-phosphate
  modified_base 5: mod_base = OTHER; note = 2'-O-methylguanosine-3'-phosphate
  modified_base 6: mod_base = OTHER; note = 2'-deoxy-2'-fluoroadenosine-3'-phosphate
  modified_base 7: mod_base = OTHER; note = 2'-O-methyladenosine-3'-phosphate
  modified_base 8: mod_base = OTHER; note = 2'-deoxy-2'-fluorouridine-3'-phosphate
  modified_base 9: mod_base = OTHER; note = 2'-deoxy-2'-fluorocytidine-3'-phosphate
  modified_base 10: mod_base = OTHER; note = 2'-O-methyladenosine-3'-phosphate
  modified_base 11: mod_base = OTHER; note = 2'-O-methyladenosine-3'-phosphate
  modified_base 12: mod_base = OTHER; note = 2'-O-methyluridine-3'-phosphate
  modified_base 13: mod_base = OTHER; note = 2'-O-methylcytidine-3'-phosphate
  modified_base 14: mod_base = OTHER; note = 2'-deoxy-2'-fluorocytidine-3'-phosphate
  modified_base 15: mod_base = OTHER; note = 2'-O-methyladenosine-3'-phosphate
  modified_base 16: mod_base = OTHER; note = 2'-deoxy-2'-fluoroadenosine-3'-phosphate
  modified_base 17: mod_base = OTHER; note = 2'-O-methylcytidine-3'-phosphate
  modified_base 18: mod_base = OTHER; note = 2'-O-methyladenosine-3'-phosphate
  modified_base 19: mod_base = OTHER; note = 2'-O-methylguanosine-3'-phosphate
  modified_base 20: mod_base = OTHER; note = 2'-O-methyluridine-3'-phosphate
  modified_base 21: mod_base = OTHER; note = 2'-O-methyladenosine-3'-phosphorothioate
  modified_base 22: mod_base = OTHER; note = 2'-O-methylguanosine-3'-phosphorothioate
  modified_base 23: mod_base = OTHER; note = 2'-O-methylcytidine
tttcgaatcaatccaacagtagc

SEQ ID NO: 89 - RNA, 21 nt, synthetic construct
  source 1..21: mol_type = other RNA
  modified_base 1: mod_base = OTHER; note = 2'-O-methyluridine-3'-phosphorothioate
  modified_base 2: mod_base = OTHER; note = 2'-O-methyladenosine-3'-phosphorothioate
  modified_base 3: mod_base = OTHER; note = 2'-O-methylcytidine-3'-phosphate
  modified_base 4: mod_base = OTHER; note = 2'-O-methyluridine-3'-phosphate
  modified_base 5: mod_base = OTHER; note = 2'-O-methylguanosine-3'-phosphate
  modified_base 6: mod_base = OTHER; note = 2'-O-hexadecyl-uridine-3'-phosphate
  modified_base 7: mod_base = OTHER; note = 2'-deoxy-2'-fluorouridine-3'-phosphate
  modified_base 8: mod_base = OTHER; note = 2'-O-methylguanosine-3'-phosphate
  modified_base 9: mod_base = OTHER; note = 2'-deoxy-2'-fluoroguanosine-3'-phosphate
  modified_base 10: mod_base = OTHER; note = 2'-deoxy-2'-fluoroadenosine-3'-phosphate
  modified_base 11: mod_base = OTHER; note = 2'-deoxy-2'-fluorouridine-3'-phosphate
  modified_base 12: mod_base = OTHER; note = 2'-O-methyluridine-3'-phosphate
  modified_base 13: mod_base = OTHER; note = 2'-O-methylguanosine-3'-phosphate
  modified_base 14: mod_base = OTHER; note = 2'-O-methyladenosine-3'-phosphate
  modified_base 15: mod_base = OTHER; note = 2'-O-methyluridine-3'-phosphate
  modified_base 16: mod_base = OTHER; note = 2'-O-methyluridine-3'-phosphate
  modified_base 17: mod_base = OTHER; note = 2'-O-methylcytidine-3'-phosphate
  modified_base 18: mod_base = OTHER; note = 2'-O-methylguanosine-3'-phosphate
  modified_base 19: mod_base = OTHER; note = 2'-O-methyladenosine-3'-phosphorothioate
  modified_base 20: mod_base = OTHER; note = 2'-O-methyladenosine-3'-phosphorothioate
  modified_base 21: mod_base = OTHER; note = 2'-O-methyladenosine
tactgttggattgattcgaaa

SEQ ID NO: 90 - RNA, 23 nt, synthetic construct
  source 1..23: mol_type = other RNA
  modified_base 1: mod_base = OTHER; note = 2'-O-methyluridine-3'-phosphorothioate 5'-phosphate
  modified_base 2: mod_base = OTHER; note = 2'-deoxy-2'-fluorouridine-3'-phosphorothioate
  modified_base 3: mod_base = OTHER; note = 2'-O-methyluridine-3'-phosphate
  modified_base 4: mod_base = OTHER; note = 2'-O-methylcytidine-3'-phosphate
  modified_base 5: mod_base = OTHER; note = 2'-O-methylguanosine-3'-phosphate
  modified_base 6: mod_base = OTHER; note = 2'-deoxy-2'-fluoroadenosine-3'-phosphate
  modified_base 7: mod_base = OTHER; note = 2'-O-methyladenosine-3'-phosphate
  modified_base 8: mod_base = OTHER; note = 2'-deoxy-2'-fluorouridine-3'-phosphate
  modified_base 9: mod_base = OTHER; note = 2'-deoxy-2'-fluorocytidine-3'-phosphate
  modified_base 10: mod_base = OTHER; note = 2'-O-methyladenosine-3'-phosphate
  modified_base 11: mod_base = OTHER; note = 2'-O-methyladenosine-3'-phosphate
  modified_base 12: mod_base = OTHER; note = 2'-O-methyluridine-3'-phosphate
  modified_base 13: mod_base = OTHER; note = 2'-O-methylcytidine-3'-phosphate
  modified_base 14: mod_base = OTHER; note = 2'-deoxy-2'-fluorocytidine-3'-phosphate
  modified_base 15: mod_base = OTHER; note = 2'-O-methyladenosine-3'-phosphate
  modified_base 16: mod_base = OTHER; note = 2'-deoxy-2'-fluoroadenosine-3'-phosphate
  modified_base 17: mod_base = OTHER; note = 2'-O-methylcytidine-3'-phosphate
  modified_base 18: mod_base = OTHER; note = 2'-O-methyladenosine-3'-phosphate
  modified_base 19: mod_base = OTHER; note = 2'-O-methylguanosine-3'-phosphate
  modified_base 20: mod_base = OTHER; note = 2'-O-methyluridine-3'-phosphate
  modified_base 21: mod_base = OTHER; note = 2'-O-methyladenosine-3'-phosphorothioate
  modified_base 22: mod_base = OTHER; note = 2'-O-methylguanosine-3'-phosphorothioate
  modified_base 23: mod_base = OTHER; note = 2'-O-methylcytidine
tttcgaatcaatccaacagtagc

SEQ ID NO: 91 - RNA, 21 nt, synthetic construct
  source 1..21: mol_type = other RNA
  modified_base 1: mod_base = OTHER; note = 2'-O-methyluridine-3'-phosphorothioate
  modified_base 2: mod_base = OTHER; note = 2'-O-methyladenosine-3'-phosphorothioate
  modified_base 3: mod_base = OTHER; note = 2'-O-methylcytidine-3'-phosphate
  modified_base 4: mod_base = OTHER; note = 2'-O-methyluridine-3'-phosphate
  modified_base 5: mod_base = OTHER; note = 2'-O-methylguanosine-3'-phosphate
  modified_base 6: mod_base = OTHER; note = 2'-O-hexadecyl-uridine-3'-phosphate
  modified_base 7: mod_base = OTHER; note = 2'-deoxy-2'-fluorouridine-3'-phosphate
  modified_base 8: mod_base = OTHER; note = 2'-O-methylguanosine-3'-phosphate
  modified_base 9: mod_base = OTHER; note = 2'-deoxy-2'-fluoroguanosine-3'-phosphate
  modified_base 10: mod_base = OTHER; note = 2'-deoxy-2'-fluoroadenosine-3'-phosphate
  modified_base 11: mod_base = OTHER; note = 2'-deoxy-2'-fluorouridine-3'-phosphate
  modified_base 12: mod_base = OTHER; note = 2'-O-methyluridine-3'-phosphate
  modified_base 13: mod_base = OTHER; note = 2'-O-methylguanosine-3'-phosphate
  modified_base 14: mod_base = OTHER; note = 2'-O-methyladenosine-3'-phosphate
  modified_base 15: mod_base = OTHER; note = 2'-O-methyluridine-3'-phosphate
  modified_base 16: mod_base = OTHER; note = 2'-O-methyluridine-3'-phosphate
  modified_base 17: mod_base = OTHER; note = 2'-O-methylcytidine-3'-phosphate
  modified_base 18: mod_base = OTHER; note = 2'-O-methylguanosine-3'-phosphate
  modified_base 19: mod_base = OTHER; note = 2'-O-methyladenosine-3'-phosphorothioate
  modified_base 20: mod_base = OTHER; note = 2'-O-methyladenosine-3'-phosphorothioate
  modified_base 21: mod_base = OTHER; note = 2'-O-methyladenosine
tactgttggattgattcgaaa

SEQ ID NO: 92 - RNA, 23 nt, synthetic construct
  source 1..23: mol_type = other RNA
  modified_base 1: mod_base = OTHER; note = 1-(alpha-L-threofuranosyl)thymine 2'-phosphorothioate
  modified_base 2: mod_base = OTHER; note = 2'-deoxy-2'-fluorouridine-3'-phosphorothioate
  modified_base 3: mod_base = OTHER; note = 2'-O-methyluridine-3'-phosphate
  modified_base 4: mod_base = OTHER; note = 2'-O-methylcytidine-3'-phosphate
  modified_base 5: mod_base = OTHER; note = 2'-O-methylguanosine-3'-phosphate
  modified_base 6: mod_base = OTHER; note = 2'-deoxy-2'-fluoroadenosine-3'-phosphate
  modified_base 7: mod_base = OTHER; note = 2'-O-methyladenosine-3'-phosphate
  modified_base 8: mod_base = OTHER; note = 2'-deoxy-2'-fluorouridine-3'-phosphate
  modified_base 9: mod_base = OTHER; note = 2'-deoxy-2'-fluorocytidine-3'-phosphate
  modified_base 10: mod_base = OTHER; note = 2'-O-methyladenosine-3'-phosphate
  modified_base 11: mod_base = OTHER; note = 2'-O-methyladenosine-3'-phosphate
  modified_base 12: mod_base = OTHER; note = 2'-O-methyluridine-3'-phosphate
  modified_base 13: mod_base = OTHER; note = 2'-O-methylcytidine-3'-phosphate
  modified_base 14: mod_base = OTHER; note = 2'-deoxy-2'-fluorocytidine-3'-phosphate
  modified_base 15: mod_base = OTHER; note = 2'-O-methyladenosine-3'-phosphate
  modified_base 16: mod_base = OTHER; note = 2'-deoxy-2'-fluoroadenosine-3'-phosphate
  modified_base 17: mod_base = OTHER; note = 2'-O-methylcytidine-3'-phosphate
  modified_base 18: mod_base = OTHER; note = 2'-O-methyladenosine-3'-phosphate
  modified_base 19: mod_base = OTHER; note = 2'-O-methylguanosine-3'-phosphate
  modified_base 20: mod_base = OTHER; note = 2'-O-methyluridine-3'-phosphate
  modified_base 21: mod_base = OTHER; note = 2'-O-methyladenosine-3'-phosphorothioate
  modified_base 22: mod_base = OTHER; note = 2'-O-methylguanosine-3'-phosphorothioate
  modified_base 23: mod_base = OTHER; note = 2'-O-methylcytidine
tttcgaatcaatccaacagtagc

SEQ ID NO: 93 - RNA, 21 nt, synthetic construct
  source 1..21: mol_type = other RNA
  modified_base 1: mod_base = OTHER; note = 2'-O-methyluridine-3'-phosphorothioate
  modified_base 2: mod_base = OTHER; note = 2'-O-methyladenosine-3'-phosphorothioate
  modified_base 3: mod_base = OTHER; note = 2'-O-methylcytidine-3'-phosphate
  modified_base 4: mod_base = OTHER; note = 2'-O-methyluridine-3'-phosphate
  modified_base 5: mod_base = OTHER; note = 2'-O-methylguanosine-3'-phosphate
  modified_base 6: mod_base = OTHER; note = 2'-O-hexadecyl-uridine-3'-phosphate
  modified_base 7: mod_base = OTHER; note = 2'-deoxy-2'-fluorouridine-3'-phosphate
  modified_base 8: mod_base = OTHER; note = 2'-O-methylguanosine-3'-phosphate
  modified_base 9: mod_base = OTHER; note = 2'-deoxy-2'-fluoroguanosine-3'-phosphate
  modified_base 10: mod_base = OTHER; note = 2'-deoxy-2'-fluoroadenosine-3'-phosphate
  modified_base 11: mod_base = OTHER; note = 2'-deoxy-2'-fluorouridine-3'-phosphate
  modified_base 12: mod_base = OTHER; note = 2'-O-methyluridine-3'-phosphate
  modified_base 13: mod_base = OTHER; note = 2'-O-methylguanosine-3'-phosphate
  modified_base 14: mod_base = OTHER; note = 2'-O-methyladenosine-3'-phosphate
  modified_base 15: mod_base = OTHER; note = 2'-O-methyluridine-3'-phosphate
  modified_base 16: mod_base = OTHER; note = 2'-O-methyluridine-3'-phosphate
  modified_base 17: mod_base = OTHER; note = 2'-O-methylcytidine-3'-phosphate
  modified_base 18: mod_base = OTHER; note = 2'-O-methylguanosine-3'-phosphate
  modified_base 19: mod_base = OTHER; note = 2'-O-methyladenosine-3'-phosphorothioate
  modified_base 20: mod_base = OTHER; note = 2'-O-methyladenosine-3'-phosphorothioate
  modified_base 21: mod_base = OTHER; note = 2'-O-methyladenosine
tactgttggattgattcgaaa

SEQ ID NO: 94 - RNA, 23 nt, synthetic construct
  source 1..23: mol_type = other RNA
  modified_base 1: mod_base = OTHER; note = 1-(alpha-L-threofuranosyl)thymine 2'-phosphorothioate-3'-phosphate
  modified_base 2: mod_base = OTHER; note = 2'-deoxy-2'-fluorouridine-3'-phosphorothioate
  modified_base 3: mod_base = OTHER; note = 2'-O-methyluridine-3'-phosphate
  modified_base 4: mod_base = OTHER; note = 2'-O-methylcytidine-3'-phosphate
  modified_base 5: mod_base = OTHER; note = 2'-O-methylguanosine-3'-phosphate
  modified_base 6: mod_base = OTHER; note = 2'-deoxy-2'-fluoroadenosine-3'-phosphate
  modified_base 7: mod_base = OTHER; note = 2'-O-methyladenosine-3'-phosphate
  modified_base 8: mod_base = OTHER; note = 2'-deoxy-2'-fluorouridine-3'-phosphate
  modified_base 9: mod_base = OTHER; note = 2'-deoxy-2'-fluorocytidine-3'-phosphate
  modified_base 10: mod_base = OTHER; note = 2'-O-methyladenosine-3'-phosphate
  modified_base 11: mod_base = OTHER; note = 2'-O-methyladenosine-3'-phosphate
  modified_base 12: mod_base = OTHER; note = 2'-O-methyluridine-3'-phosphate
  modified_base 13: mod_base = OTHER; note = 2'-O-methylcytidine-3'-phosphate
  modified_base 14: mod_base = OTHER; note = 2'-deoxy-2'-fluorocytidine-3'-phosphate
  modified_base 15: mod_base = OTHER; note = 2'-O-methyladenosine-3'-phosphate
  modified_base 16: mod_base = OTHER; note = 2'-deoxy-2'-fluoroadenosine-3'-phosphate
  modified_base 17: mod_base = OTHER; note = 2'-O-methylcytidine-3'-phosphate
  modified_base 18: mod_base = OTHER; note = 2'-O-methyladenosine-3'-phosphate
  modified_base 19: mod_base = OTHER; note = 2'-O-methylguanosine-3'-phosphate
  modified_base 20: mod_base = OTHER; note = 2'-O-methyluridine-3'-phosphate
  modified_base 21: mod_base = OTHER; note = 2'-O-methyladenosine-3'-phosphorothioate
  modified_base 22: mod_base = OTHER; note = 2'-O-methylguanosine-3'-phosphorothioate
  modified_base 23: mod_base = OTHER; note = 2'-O-methylcytidine
tttcgaatcaatccaacagtagc

SEQ ID NO: 95 - RNA, 21 nt, synthetic construct
  source 1..21: mol_type = other RNA
  modified_base 1: mod_base = OTHER; note = 2'-deoxy-2'-fluorouridine-3'-phosphorothioate
  modified_base 2: mod_base = OTHER; note = 2'-O-methylguanosine-3'-phosphorothioate
  modified_base 3: mod_base = OTHER; note = 2'-deoxy-2'-fluorouridine-3'-phosphate
  modified_base 4: mod_base = OTHER; note = 2'-O-methylguanosine-3'-phosphate
  modified_base 5: mod_base = OTHER; note = 2'-deoxy-2'-fluoroadenosine-3'-phosphate
  modified_base 6: mod_base = OTHER; note = 2'-O-methylcytidine-3'-phosphate
  modified_base 7: mod_base = OTHER; note = 2'-deoxy-2'-fluoroadenosine-3'-phosphate
  modified_base 8: mod_base = OTHER; note = 2'-O-methyladenosine-3'-phosphate
  modified_base 9: mod_base = OTHER; note = 2'-deoxy-2'-fluoroadenosine-3'-phosphate
  modified_base 10: mod_base = OTHER; note = 2'-deoxy-2'-fluorouridine-3'-phosphate
  modified_base 11: mod_base = OTHER; note = 2'-deoxy-2'-fluoroadenosine-3'-phosphate
  modified_base 12: mod_base = OTHER; note = 2'-O-methyluridine-3'-phosphate
  modified_base 13: mod_base = OTHER; note = 2'-deoxy-2'-fluoroguanosine-3'-phosphate
  modified_base 14: mod_base = OTHER; note = 2'-O-methylguanosine-3'-phosphate
  modified_base 15: mod_base = OTHER; note = 2'-deoxy-2'-fluoroguanosine-3'-phosphate
  modified_base 16: mod_base = OTHER; note = 2'-O-methylcytidine-3'-phosphate
  modified_base 17: mod_base = OTHER; note = 2'-deoxy-2'-fluoroadenosine-3'-phosphate
  modified_base 18: mod_base = OTHER; note = 2'-O-methyluridine-3'-phosphate
  modified_base 19: mod_base = OTHER; note = 2'-deoxy-2'-fluorocytidine-3'-phosphate
  modified_base 20: mod_base = OTHER; note = 2'-O-methyladenosine-3'-phosphate
  modified_base 21: mod_base = OTHER; note = 2'-deoxy-2'-fluoroadenosine-3'-phosphate ((2S,4R)-1-[29-[[2-(acetylamino)-2-deoxy-beta-D-galactopyra nosyl]oxy]-14,14-bis[[3-[[3-[[5-[[2-(acetylamino)-2-deoxy-b eta-D-galactopyranosyl]oxy]-1-oxopentyl]amino]propyl]amino] -3-oxopropoxy]methyl]-1,12,19,25-tetraoxo-16-oxa-13,20,24-t riazanonacos-1-yl]-4-hydroxy-2-pyrrolidinyl)methyl ester
tgtgacaaatatgggcatcaa

SEQ ID NO: 96 - RNA, 23 nt, synthetic construct
  source 1..23: mol_type = other RNA
  modified_base 1: mod_base = OTHER; note = 2'-O-methyluridine-3'-phosphorothioate
  modified_base 2: mod_base = OTHER; note = 2'-deoxy-2'-fluorouridine-3'-phosphorothioate
  modified_base 3: mod_base = OTHER; note = 2'-O-methylguanosine-3'-phosphate
  modified_base 4: mod_base = OTHER; note = 2'-deoxy-2'-fluoroadenosine-3'-phosphate
  modified_base 5: mod_base = OTHER; note = 2'-O-methyluridine-3'-phosphate
  modified_base 6: mod_base = OTHER; note = 2'-deoxy-2'-fluoroguanosine-3'-phosphate
  modified_base 7: mod_base = OTHER; note = 2'-O-methylcytidine-3'-phosphate
  modified_base 8: mod_base = OTHER; note = 2'-deoxy-2'-fluorocytidine-3'-phosphate
  modified_base 9: mod_base = OTHER; note = 2'-O-methylcytidine-3'-phosphate
  modified_base 10: mod_base = OTHER; note = 2'-deoxy-2'-fluoroadenosine-3'-phosphate
  modified_base 11: mod_base = OTHER; note = 2'-O-methyluridine-3'-phosphate
  modified_base 12: mod_base = OTHER; note = 2'-O-methyladenosine-3'-phosphate
  modified_base 13: mod_base = OTHER; note = 2'-O-methyluridine-3'-phosphate
  modified_base 14: mod_base = OTHER; note = 2'-deoxy-2'-fluorouridine-3'-phosphate
  modified_base 15: mod_base = OTHER; note = 2'-O-methyluridine-3'-phosphate
  modified_base 16: mod_base = OTHER; note = 2'-deoxy-2'-fluoroguanosine-3'-phosphate
  modified_base 17: mod_base = OTHER; note = 2'-O-methyluridine-3'-phosphate
  modified_base 18: mod_base = OTHER; note = 2'-deoxy-2'-fluorocytidine-3'-phosphate
  modified_base 19: mod_base = OTHER; note = 2'-O-methyladenosine-3'-phosphate
  modified_base 20: mod_base = OTHER; note = 2'-deoxy-2'-fluorocytidine-3'-phosphate
  modified_base 21: mod_base = OTHER; note = 2'-O-methyladenosine-3'-phosphorothioate
  modified_base 22: mod_base = OTHER; note = 2'-O-methyladenosine-3'-phosphorothioate
  modified_base 23: mod_base = OTHER; note = 2'-O-methyladenosine
ttgatgcccatatttgtcacaaa

SEQ ID NO: 97 - RNA, 21 nt, synthetic construct
  source 1..21: mol_type = other RNA
  modified_base 1: mod_base = OTHER; note = 2'-deoxy-2'-fluorouridine-3'-phosphorothioate
  modified_base 2: mod_base = OTHER; note = 2'-O-methylguanosine-3'-phosphorothioate
  modified_base 3: mod_base = OTHER; note = 2'-deoxy-2'-fluorouridine-3'-phosphate
  modified_base 4: mod_base = OTHER; note = 2'-O-methylguanosine-3'-phosphate
  modified_base 5: mod_base = OTHER; note = 2'-deoxy-2'-fluoroadenosine-3'-phosphate
  modified_base 6: mod_base = OTHER; note = 2'-O-methylcytidine-3'-phosphate
  modified_base 7: mod_base = OTHER; note = 2'-deoxy-2'-fluoroadenosine-3'-phosphate
  modified_base 8: mod_base = OTHER; note = 2'-O-methyladenosine-3'-phosphate
  modified_base 9: mod_base = OTHER; note = 2'-deoxy-2'-fluoroadenosine-3'-phosphate
  modified_base 10: mod_base = OTHER; note = 2'-deoxy-2'-fluorouridine-3'-phosphate
  modified_base 11: mod_base = OTHER; note = 2'-deoxy-2'-fluoroadenosine-3'-phosphate
  modified_base 12: mod_base = OTHER; note = 2'-O-methyluridine-3'-phosphate
  modified_base 13: mod_base = OTHER; note = 2'-deoxy-2'-fluoroguanosine-3'-phosphate
  modified_base 14: mod_base = OTHER; note = 2'-O-methylguanosine-3'-phosphate
  modified_base 15: mod_base = OTHER; note = 2'-deoxy-2'-fluoroguanosine-3'-phosphate
  modified_base 16: mod_base = OTHER; note = 2'-O-methylcytidine-3'-phosphate
  modified_base 17: mod_base = OTHER; note = 2'-deoxy-2'-fluoroadenosine-3'-phosphate
  modified_base 18: mod_base = OTHER; note = 2'-O-methyluridine-3'-phosphate
  modified_base 19: mod_base = OTHER; note = 2'-deoxy-2'-fluorocytidine-3'-phosphate
  modified_base 20: mod_base = OTHER; note = 2'-O-methyladenosine-3'-phosphate
  modified_base 21: mod_base = OTHER; note = 2'-deoxy-2'-fluoroadenosine-3'-phosphate ((2S,4R)-1-[29-[[2-(acetylamino)-2-deoxy-beta-D-galactopyra nosyl]oxy]-14,14-bis[[3-[[3-[[5-[[2-(acetylamino)-2-deoxy-b eta-D-galactopyranosyl]oxy]-1-oxopentyl]amino]propyl]amino] -3-oxopropoxy]methyl]-1,12,19,25-tetraoxo-16-oxa-13,20,24-t riazanonacos-1-yl]-4-hydroxy-2-pyrrolidinyl)methyl ester
tgtgacaaatatgggcatcaa

SEQ ID NO: 98 - RNA, 23 nt, synthetic construct
  source 1..23: mol_type = other RNA
  modified_base 1: mod_base = OTHER; note = 2'-O-methyluridine-3'-phosphorothioate 5'-phosphate
  modified_base 2: mod_base = OTHER; note = 2'-deoxy-2'-fluorouridine-3'-phosphorothioate
  modified_base 3: mod_base = OTHER; note = 2'-O-methylguanosine-3'-phosphate
  modified_base 4: mod_base = OTHER; note = 2'-deoxy-2'-fluoroadenosine-3'-phosphate
  modified_base 5: mod_base = OTHER; note = 2'-O-methyluridine-3'-phosphate
  modified_base 6: mod_base = OTHER; note = 2'-deoxy-2'-fluoroguanosine-3'-phosphate
  modified_base 7: mod_base = OTHER; note = 2'-O-methylcytidine-3'-phosphate
  modified_base 8: mod_base = OTHER; note = 2'-deoxy-2'-fluorocytidine-3'-phosphate
  modified_base 9: mod_base = OTHER; note = 2'-O-methylcytidine-3'-phosphate
  modified_base 10: mod_base = OTHER; note = 2'-deoxy-2'-fluoroadenosine-3'-phosphate
  modified_base 11: mod_base = OTHER; note = 2'-O-methyluridine-3'-phosphate
  modified_base 12: mod_base = OTHER; note = 2'-O-methyladenosine-3'-phosphate
  modified_base 13: mod_base = OTHER; note = 2'-O-methyluridine-3'-phosphate
  modified_base 14: mod_base = OTHER; note = 2'-deoxy-2'-fluorouridine-3'-phosphate
  modified_base 15: mod_base = OTHER; note = 2'-O-methyluridine-3'-phosphate
  modified_base 16: mod_base = OTHER; note = 2'-deoxy-2'-fluoroguanosine-3'-phosphate
  modified_base 17: mod_base = OTHER; note = 2'-O-methyluridine-3'-phosphate
  modified_base 18: mod_base = OTHER; note = 2'-deoxy-2'-fluorocytidine-3'-phosphate
  modified_base 19: mod_base = OTHER; note = 2'-O-methyladenosine-3'-phosphate
  modified_base 20: mod_base = OTHER; note = 2'-deoxy-2'-fluorocytidine-3'-phosphate
  modified_base 21: mod_base = OTHER; note = 2'-O-methyladenosine-3'-phosphorothioate
  modified_base 22: mod_base = OTHER; note = 2'-O-methyladenosine-3'-phosphorothioate
  modified_base 23: mod_base = OTHER; note = 2'-O-methyladenosine
ttgatgcccatatttgtcacaaa

SEQ ID NO: 99 - RNA, 21 nt, synthetic construct
  source 1..21: mol_type = other RNA
  modified_base 1: mod_base = OTHER; note = 2'-deoxy-2'-fluorouridine-3'-phosphorothioate
  modified_base 2: mod_base = OTHER; note = 2'-O-methylguanosine-3'-phosphorothioate
  modified_base 3: mod_base = OTHER; note = 2'-deoxy-2'-fluorouridine-3'-phosphate
  modified_base 4: mod_base = OTHER; note = 2'-O-methylguanosine-3'-phosphate
  modified_base 5: mod_base = OTHER; note = 2'-deoxy-2'-fluoroadenosine-3'-phosphate
  modified_base 6: mod_base = OTHER; note = 2'-O-methylcytidine-3'-phosphate
  modified_base 7: mod_base = OTHER; note = 2'-deoxy-2'-fluoroadenosine-3'-phosphate
  modified_base 8: mod_base = OTHER; note = 2'-O-methyladenosine-3'-phosphate
  modified_base 9: mod_base = OTHER; note = 2'-deoxy-2'-fluoroadenosine-3'-phosphate
  modified_base 10: mod_base = OTHER; note = 2'-deoxy-2'-fluorouridine-3'-phosphate
  modified_base 11: mod_base = OTHER; note = 2'-deoxy-2'-fluoroadenosine-3'-phosphate
  modified_base 12: mod_base = OTHER; note = 2'-O-methyluridine-3'-phosphate
  modified_base 13: mod_base = OTHER; note = 2'-deoxy-2'-fluoroguanosine-3'-phosphate
  modified_base 14: mod_base = OTHER; note = 2'-O-methylguanosine-3'-phosphate
  modified_base 15: mod_base = OTHER; note = 2'-deoxy-2'-fluoroguanosine-3'-phosphate
  modified_base 16: mod_base = OTHER; note = 2'-O-methylcytidine-3'-phosphate
  modified_base 17: mod_base = OTHER; note = 2'-deoxy-2'-fluoroadenosine-3'-phosphate
  modified_base 18: mod_base = OTHER; note = 2'-O-methyluridine-3'-phosphate
  modified_base 19: mod_base = OTHER; note = 2'-deoxy-2'-fluorocytidine-3'-phosphate
  modified_base 20: mod_base = OTHER; note = 2'-O-methyladenosine-3'-phosphate
  modified_base 21: mod_base = OTHER; note = 2'-deoxy-2'-fluoroadenosine-3'-phosphate ((2S,4R)-1-[29-[[2-(acetylamino)-2-deoxy-beta-D-galactopyra nosyl]oxy]-14,14-bis[[3-[[3-[[5-[[2-(acetylamino)-2-deoxy-b eta-D-galactopyranosyl]oxy]-1-oxopentyl]amino]propyl]amino] -3-oxopropoxy]methyl]-1,12,19,25-tetraoxo-16-oxa-13,20,24-t riazanonacos-1-yl]-4-hydroxy-2-pyrrolidinyl)methyl ester
tgtgacaaatatgggcatcaa

SEQ ID NO: 100 - RNA, 23 nt, synthetic construct
  source 1..23: mol_type = other RNA
  modified_base 1: mod_base = OTHER; note = 1-(alpha-L-threofuranosyl)thymine 2'-phosphorothioate
  modified_base 2: mod_base = OTHER; note = 2'-deoxy-2'-fluorouridine-3'-phosphorothioate
  modified_base 3: mod_base = OTHER; note = 2'-O-methylguanosine-3'-phosphate
  modified_base 4: mod_base = OTHER; note = 2'-deoxy-2'-fluoroadenosine-3'-phosphate
  modified_base 5: mod_base = OTHER; note = 2'-O-methyluridine-3'-phosphate
  modified_base 6: mod_base = OTHER; note = 2'-deoxy-2'-fluoroguanosine-3'-phosphate
  modified_base 7: mod_base = OTHER; note = 2'-O-methylcytidine-3'-phosphate
  modified_base 8: mod_base = OTHER; note = 2'-deoxy-2'-fluorocytidine-3'-phosphate
  modified_base 9: mod_base = OTHER; note = 2'-O-methylcytidine-3'-phosphate
  modified_base 10: mod_base = OTHER; note = 2'-deoxy-2'-fluoroadenosine-3'-phosphate
  modified_base 11: mod_base = OTHER; note = 2'-O-methyluridine-3'-phosphate
  modified_base 12: mod_base = OTHER; note = 2'-O-methyladenosine-3'-phosphate
  modified_base 13: mod_base = OTHER; note = 2'-O-methyluridine-3'-phosphate
  modified_base 14: mod_base = OTHER; note = 2'-deoxy-2'-fluorouridine-3'-phosphate
  modified_base 15: mod_base = OTHER; note = 2'-O-methyluridine-3'-phosphate
  modified_base 16: mod_base = OTHER; note = 2'-deoxy-2'-fluoroguanosine-3'-phosphate
  modified_base 17: mod_base = OTHER; note = 2'-O-methyluridine-3'-phosphate
  modified_base 18: mod_base = OTHER; note = 2'-deoxy-2'-fluorocytidine-3'-phosphate
  modified_base 19: mod_base = OTHER; note = 2'-O-methyladenosine-3'-phosphate
  modified_base 20: mod_base = OTHER; note = 2'-deoxy-2'-fluorocytidine-3'-phosphate
  modified_base 21: mod_base = OTHER; note = 2'-O-methyladenosine-3'-phosphorothioate
  modified_base 22: mod_base = OTHER; note = 2'-O-methyladenosine-3'-phosphorothioate
  modified_base 23: mod_base = OTHER; note = 2'-O-methyladenosine
ttgatgcccatatttgtcacaaa

SEQ ID NO: 101 - RNA, 21 nt, synthetic construct
  source 1..21: mol_type = other RNA
  modified_base 1: mod_base = OTHER; note = 2'-deoxy-2'-fluorouridine-3'-phosphorothioate
  modified_base 2: mod_base = OTHER; note = 2'-O-methylguanosine-3'-phosphorothioate
  modified_base 3: mod_base = OTHER; note = 2'-deoxy-2'-fluorouridine-3'-phosphate
  modified_base 4: mod_base = OTHER; note = 2'-O-methylguanosine-3'-phosphate
  modified_base 5: mod_base = OTHER; note = 2'-deoxy-2'-fluoroadenosine-3'-phosphate
  modified_base 6: mod_base = OTHER; note = 2'-O-methylcytidine-3'-phosphate
  modified_base 7: mod_base = OTHER; note = 2'-deoxy-2'-fluoroadenosine-3'-phosphate
  modified_base 8: mod_base = OTHER; note = 2'-O-methyladenosine-3'-phosphate
  modified_base 9: mod_base = OTHER; note = 2'-deoxy-2'-fluoroadenosine-3'-phosphate
  modified_base 10: mod_base = OTHER; note = 2'-deoxy-2'-fluorouridine-3'-phosphate
  modified_base 11: mod_base = OTHER; note = 2'-deoxy-2'-fluoroadenosine-3'-phosphate
  modified_base 12: mod_base = OTHER; note = 2'-O-methyluridine-3'-phosphate
  modified_base 13: mod_base = OTHER; note = 2'-deoxy-2'-fluoroguanosine-3'-phosphate
  modified_base 14: mod_base = OTHER; note = 2'-O-methylguanosine-3'-phosphate
  modified_base 15: mod_base = OTHER; note = 2'-deoxy-2'-fluoroguanosine-3'-phosphate
  modified_base 16: mod_base = OTHER; note = 2'-O-methylcytidine-3'-phosphate
  modified_base 17: mod_base = OTHER; note = 2'-deoxy-2'-fluoroadenosine-3'-phosphate
  modified_base 18: mod_base = OTHER; note = 2'-O-methyluridine-3'-phosphate
  modified_base 19: mod_base = OTHER; note = 2'-deoxy-2'-fluorocytidine-3'-phosphate
  modified_base 20: mod_base = OTHER; note = 2'-O-methyladenosine-3'-phosphate
  modified_base 21: mod_base = OTHER; note = 2'-deoxy-2'-fluoroadenosine-3'-phosphate ((2S,4R)-1-[29-[[2-(acetylamino)-2-deoxy-beta-D-galactopyra nosyl]oxy]-14,14-bis[[3-[[3-[[5-[[2-(acetylamino)-2-deoxy-b eta-D-galactopyranosyl]oxy]-1-oxopentyl]amino]propyl]amino] -3-oxopropoxy]methyl]-1,12,19,25-tetraoxo-16-oxa-13,20,24-t riazanonacos-1-yl]-4-hydroxy-2-pyrrolidinyl)methyl ester
tgtgacaaatatgggcatcaa

SEQ ID NO: 102 - RNA, 23 nt, synthetic construct
  source 1..23: mol_type = other RNA
  modified_base 1: mod_base = OTHER; note = 1-(alpha-L-threofuranosyl)thymine 2'-phosphorothioate-3'-phosphate
  modified_base 2: mod_base = OTHER; note = 2'-deoxy-2'-fluorouridine-3'-phosphorothioate
  modified_base 3: mod_base = OTHER; note = 2'-O-methylguanosine-3'-phosphate
  modified_base 4: mod_base = OTHER; note = 2'-deoxy-2'-fluoroadenosine-3'-phosphate
  modified_base 5: mod_base = OTHER; note = 2'-O-methyluridine-3'-phosphate
  modified_base 6: mod_base = OTHER; note = 2'-deoxy-2'-fluoroguanosine-3'-phosphate
  modified_base 7: mod_base = OTHER; note = 2'-O-methylcytidine-3'-phosphate
  modified_base 8: mod_base = OTHER; note = 2'-deoxy-2'-fluorocytidine-3'-phosphate
  modified_base 9: mod_base = OTHER; note = 2'-O-methylcytidine-3'-phosphate
  modified_base 10: mod_base = OTHER; note = 2'-deoxy-2'-fluoroadenosine-3'-phosphate
  modified_base 11: mod_base = OTHER; note = 2'-O-methyluridine-3'-phosphate
  modified_base 12: mod_base = OTHER; note = 2'-O-methyladenosine-3'-phosphate
  modified_base 13: mod_base = OTHER; note = 2'-O-methyluridine-3'-phosphate
  modified_base 14: mod_base = OTHER; note = 2'-deoxy-2'-fluorouridine-3'-phosphate
  modified_base 15: mod_base = OTHER; note = 2'-O-methyluridine-3'-phosphate
  modified_base 16: mod_base = OTHER; note = 2'-deoxy-2'-fluoroguanosine-3'-phosphate
  modified_base 17: mod_base = OTHER; note = 2'-O-methyluridine-3'-phosphate
  modified_base 18: mod_base = OTHER; note = 2'-deoxy-2'-fluorocytidine-3'-phosphate
  modified_base 19: mod_base = OTHER; note = 2'-O-methyladenosine-3'-phosphate
  modified_base 20: mod_base = OTHER; note = 2'-deoxy-2'-fluorocytidine-3'-phosphate
  modified_base 21: mod_base = OTHER; note = 2'-O-methyladenosine-3'-phosphorothioate
  modified_base 22: mod_base = OTHER; note = 2'-O-methyladenosine-3'-phosphorothioate
  modified_base 23: mod_base = OTHER; note = 2'-O-methyladenosine
ttgatgcccatatttgtcacaaa

SEQ ID NO: 103 - RNA, 21 nt, synthetic construct
  source 1..21: mol_type = other RNA
  modified_base 1: mod_base = OTHER; note = 2'-O-methylcytidine-3'-phosphorothioate
  modified_base 2: mod_base = OTHER; note = 2'-O-methyladenosine-3'-phosphorothioate
  modified_base 3: mod_base = OTHER; note = 2'-O-methyluridine-3'-phosphate
  modified_base 4: mod_base = OTHER; note = 2'-O-methyluridine-3'-phosphate
  modified_base 5: mod_base = OTHER; note = 2'-O-methyluridine-3'-phosphate
  modified_base 6: mod_base = OTHER; note = 2'-O-hexadecyl-uridine-3'-phosphate
  modified_base 7: mod_base = OTHER; note = 2'-deoxy-2'-fluoroadenosine-3'-phosphate
  modified_base 8: mod_base = OTHER; note = 2'-O-methyladenosine-3'-phosphate
  modified_base 9: mod_base = OTHER; note = 2'-deoxy-2'-fluorouridine-3'-phosphate
  modified_base 10: mod_base = OTHER; note = 2'-deoxy-2'-fluorocytidine-3'-phosphate
  modified_base 11: mod_base = OTHER; note = 2'-deoxy-2'-fluorocytidine-3'-phosphate
  modified_base 12: mod_base = OTHER; note = 2'-O-methyluridine-3'-phosphate
  modified_base 13: mod_base = OTHER; note = 2'-O-methylcytidine-3'-phosphate
  modified_base 14: mod_base = OTHER; note = 2'-O-methyladenosine-3'-phosphate
  modified_base 15: mod_base = OTHER; note = 2'-O-methylcytidine-3'-phosphate
  modified_base 16: mod_base = OTHER; note = 2'-O-methyluridine-3'-phosphate
  modified_base 17: mod_base = OTHER; note = 2'-O-methylcytidine-3'-phosphate
  modified_base 18: mod_base = OTHER; note = 2'-O-methyluridine-3'-phosphate
  modified_base 19: mod_base = OTHER; note = 2'-O-methyladenosine-3'-phosphorothioate
  modified_base 20: mod_base = OTHER; note = 2'-O-methyladenosine-3'-phosphorothioate
  modified_base 21: mod_base = OTHER; note = 2'-O-methyladenosine
cattttaatcctcactctaaa

SEQ ID NO: 104 - RNA, 23 nt, synthetic construct
  source 1..23: mol_type = other RNA
  modified_base 1: mod_base = OTHER; note = 2'-O-methyluridine-3'-phosphorothioate 5'-(E)-Vinylphosphonate
  modified_base 2: mod_base = OTHER; note = 2'-deoxy-2'-fluorouridine-3'-phosphorothioate
  modified_base 3: mod_base = OTHER; note = 2'-O-methyluridine-3'-phosphate
  modified_base 4: mod_base = OTHER; note = 2'-O-methyladenosine-3'-phosphate
  modified_base 5: mod_base = OTHER; note = 2'-O-methylguanosine-3'-phosphate
  modified_base 6: mod_base = OTHER; note = 2'-deoxy-2'-fluoroadenosine-3'-phosphate
  modified_base 7: mod_base = OTHER; note = 2'-O-methylguanosine-3'-phosphate
  modified_base 8: mod_base = OTHER; note = 2'-deoxy-2'-fluorouridine-3'-phosphate
  modified_base 9: mod_base = OTHER; note = 2'-deoxy-2'-fluoroguanosine-3'-phosphate
  modified_base 10: mod_base = OTHER; note = 2'-O-methyladenosine-3'-phosphate
  modified_base 11: mod_base = OTHER; note = 2'-O-methylguanosine-3'-phosphate
  modified_base 12: mod_base = OTHER; note = 2'-O-methylguanosine-3'-phosphate
  modified_base 13: mod_base = OTHER; note = 2'-O-methyladenosine-3'-phosphate
  modified_base 14: mod_base = OTHER; note = 2'-deoxy-2'-fluorouridine-3'-phosphate
  modified_base 15: mod_base = OTHER; note = 2'-O-methyluridine-3'-phosphate
  modified_base 16: mod_base = OTHER; note = 2'-deoxy-2'-fluoroadenosine-3'-phosphate
  modified_base 17: mod_base = OTHER; note = 2'-O-methyladenosine-3'-phosphate
  modified_base 18: mod_base = OTHER; note = 2'-O-methyladenosine-3'-phosphate
  modified_base 19: mod_base = OTHER; note = 2'-O-methyladenosine-3'-phosphate
  modified_base 20: mod_base = OTHER; note = 2'-O-methyluridine-3'-phosphate
  modified_base 21: mod_base = OTHER; note = 2'-O-methylguanosine-3'-phosphorothioate
  modified_base 22: mod_base = OTHER; note = 2'-O-methyladenosine-3'-phosphorothioate
  modified_base 23: mod_base = OTHER; note = 2'-O-methylguanosine
tttagagtgaggattaaaatgag

SEQ ID NO: 105 - RNA, 21 nt, synthetic construct
  source 1..21: mol_type = other RNA
  modified_base 1: mod_base = OTHER; note = 2'-O-methylcytidine-3'-phosphorothioate
  modified_base 2: mod_base = OTHER; note = 2'-O-methyladenosine-3'-phosphorothioate
  modified_base 3: mod_base = OTHER; note = 2'-O-methyluridine-3'-phosphate
  modified_base 4: mod_base = OTHER; note = 2'-O-methyluridine-3'-phosphate
  modified_base 5: mod_base = OTHER; note = 2'-O-methyluridine-3'-phosphate
  modified_base 6: mod_base = OTHER; note = 2'-O-hexadecyl-uridine-3'-phosphate
  modified_base 7: mod_base = OTHER; note = 2'-deoxy-2'-fluoroadenosine-3'-phosphate
  modified_base 8: mod_base = OTHER; note = 2'-O-methyladenosine-3'-phosphate
  modified_base 9: mod_base = OTHER; note = 2'-deoxy-2'-fluorouridine-3'-phosphate
  modified_base 10: mod_base = OTHER; note = 2'-deoxy-2'-fluorocytidine-3'-phosphate
  modified_base 11: mod_base = OTHER; note = 2'-deoxy-2'-fluorocytidine-3'-phosphate
  modified_base 12: mod_base = OTHER; note = 2'-O-methyluridine-3'-phosphate
  modified_base 13: mod_base = OTHER; note = 2'-O-methylcytidine-3'-phosphate
  modified_base 14: mod_base = OTHER; note = 2'-O-methyladenosine-3'-phosphate
  modified_base 15: mod_base = OTHER; note = 2'-O-methylcytidine-3'-phosphate
  modified_base 16: mod_base = OTHER; note = 2'-O-methyluridine-3'-phosphate
  modified_base 17: mod_base = OTHER; note = 2'-O-methylcytidine-3'-phosphate
  modified_base 18: mod_base = OTHER; note = 2'-O-methyluridine-3'-phosphate
  modified_base 19: mod_base = OTHER; note = 2'-O-methyladenosine-3'-phosphorothioate
  modified_base 20: mod_base = OTHER; note = 2'-O-methyladenosine-3'-phosphorothioate
  modified_base 21: mod_base = OTHER; note = 2'-O-methyladenosine
cattttaatcctcactctaaa

SEQ ID NO: 106 - RNA, 23 nt, synthetic construct
  source 1..23: mol_type = other RNA
  modified_base 1: mod_base = OTHER; note = 2'-O-methyluridine-3'-phosphorothioate 5'-phosphate
  modified_base 2: mod_base = OTHER; note = 2'-deoxy-2'-fluorouridine-3'-phosphorothioate
  modified_base 3: mod_base = OTHER; note = 2'-O-methyluridine-3'-phosphate
  modified_base 4: mod_base = OTHER; note = 2'-O-methyladenosine-3'-phosphate
  modified_base 5: mod_base = OTHER; note = 2'-O-methylguanosine-3'-phosphate
  modified_base 6: mod_base = OTHER; note = 2'-deoxy-2'-fluoroadenosine-3'-phosphate
  modified_base 7: mod_base = OTHER; note = 2'-O-methylguanosine-3'-phosphate
  modified_base 8: mod_base = OTHER; note = 2'-deoxy-2'-fluorouridine-3'-phosphate
  modified_base 9: mod_base = OTHER; note = 2'-deoxy-2'-fluoroguanosine-3'-phosphate
  modified_base 10: mod_base = OTHER; note = 2'-O-methyladenosine-3'-phosphate
  modified_base 11: mod_base = OTHER; note = 2'-O-methylguanosine-3'-phosphate
  modified_base 12: mod_base = OTHER; note = 2'-O-methylguanosine-3'-phosphate
  modified_base 13: mod_base = OTHER; note = 2'-O-methyladenosine-3'-phosphate
  modified_base 14: mod_base = OTHER; note = 2'-deoxy-2'-fluorouridine-3'-phosphate
  modified_base 15: mod_base = OTHER; note = 2'-O-methyluridine-3'-phosphate
  modified_base 16: mod_base = OTHER; note = 2'-deoxy-2'-fluoroadenosine-3'-phosphate
  modified_base 17: mod_base = OTHER; note = 2'-O-methyladenosine-3'-phosphate
  modified_base 18: mod_base = OTHER; note = 2'-O-methyladenosine-3'-phosphate
  modified_base 19: mod_base = OTHER; note = 2'-O-methyladenosine-3'-phosphate
  modified_base 20: mod_base = OTHER; note = 2'-O-methyluridine-3'-phosphate
  modified_base 21: mod_base = OTHER; note = 2'-O-methylguanosine-3'-phosphorothioate
  modified_base 22: mod_base = OTHER; note = 2'-O-methyladenosine-3'-phosphorothioate
  modified_base 23: mod_base = OTHER; note = 2'-O-methylguanosine
tttagagtgaggattaaaatgag

SEQ ID NO: 107 - RNA, 21 nt, synthetic construct
  source 1..21: mol_type = other RNA
  modified_base 1: mod_base = OTHER; note = 2'-O-methylcytidine-3'-phosphorothioate
  modified_base 2: mod_base = OTHER; note = 2'-O-methyladenosine-3'-phosphorothioate
  modified_base 3: mod_base = OTHER; note = 2'-O-methyluridine-3'-phosphate
  modified_base 4: mod_base = OTHER; note = 2'-O-methyluridine-3'-phosphate
  modified_base 5: mod_base = OTHER; note = 2'-O-methyluridine-3'-phosphate
  modified_base 6: mod_base = OTHER; note = 2'-O-hexadecyl-uridine-3'-phosphate
  modified_base 7: mod_base = OTHER; note = 2'-deoxy-2'-fluoroadenosine-3'-phosphate
  modified_base 8: mod_base = OTHER; note = 2'-O-methyladenosine-3'-phosphate
  modified_base 9: mod_base = OTHER; note = 2'-deoxy-2'-fluorouridine-3'-phosphate
  modified_base 10: mod_base = OTHER; note = 2'-deoxy-2'-fluorocytidine-3'-phosphate
  modified_base 11: mod_base = OTHER; note = 2'-deoxy-2'-fluorocytidine-3'-phosphate
  modified_base 12: mod_base = OTHER; note = 2'-O-methyluridine-3'-phosphate
  modified_base 13: mod_base = OTHER; note = 2'-O-methylcytidine-3'-phosphate
  modified_base 14: mod_base = OTHER; note = 2'-O-methyladenosine-3'-phosphate
  modified_base 15: mod_base = OTHER; note = 2'-O-methylcytidine-3'-phosphate
  modified_base 16: mod_base = OTHER; note = 2'-O-methyluridine-3'-phosphate
  modified_base 17: mod_base = OTHER; note = 2'-O-methylcytidine-3'-phosphate
  modified_base 18: mod_base = OTHER; note = 2'-O-methyluridine-3'-phosphate
  modified_base 19: mod_base = OTHER; note = 2'-O-methyladenosine-3'-phosphorothioate
  modified_base 20: mod_base = OTHER; note = 2'-O-methyladenosine-3'-phosphorothioate
  modified_base 21: mod_base = OTHER; note = 2'-O-methyladenosine
cattttaatcctcactctaaa

SEQ ID NO: 108 - RNA, 23 nt, synthetic construct
  source 1..23: mol_type = other RNA
  modified_base 1: mod_base = OTHER; note = 1-(alpha-L-threofuranosyl)thymine 2'-phosphorothioate
  modified_base 2: mod_base = OTHER; note = 2'-deoxy-2'-fluorouridine-3'-phosphorothioate
  modified_base 3: mod_base = OTHER; note = 2'-O-methyluridine-3'-phosphate
  modified_base 4: mod_base = OTHER; note = 2'-O-methyladenosine-3'-phosphate
  modified_base 5: mod_base = OTHER; note = 2'-O-methylguanosine-3'-phosphate
  modified_base 6: mod_base = OTHER; note = 2'-deoxy-2'-fluoroadenosine-3'-phosphate
  modified_base 7: mod_base = OTHER; note = 2'-O-methylguanosine-3'-phosphate
  modified_base 8: mod_base = OTHER; note = 2'-deoxy-2'-fluorouridine-3'-phosphate
  modified_base 9: mod_base = OTHER; note = 2'-deoxy-2'-fluoroguanosine-3'-phosphate
  modified_base 10: mod_base = OTHER; note = 2'-O-methyladenosine-3'-phosphate
  modified_base 11: mod_base = OTHER; note = 2'-O-methylguanosine-3'-phosphate
  modified_base 12: mod_base = OTHER; note = 2'-O-methylguanosine-3'-phosphate
  modified_base 13: mod_base = OTHER; note = 2'-O-methyladenosine-3'-phosphate
  modified_base 14: mod_base = OTHER; note = 2'-deoxy-2'-fluorouridine-3'-phosphate
  modified_base 15: mod_base = OTHER; note = 2'-O-methyluridine-3'-phosphate
  modified_base 16: mod_base = OTHER; note = 2'-deoxy-2'-fluoroadenosine-3'-phosphate
  modified_base 17: mod_base = OTHER; note = 2'-O-methyladenosine-3'-phosphate
  modified_base 18: mod_base = OTHER; note = 2'-O-methyladenosine-3'-phosphate
  modified_base 19: mod_base = OTHER; note = 2'-O-methyladenosine-3'-phosphate
  modified_base 20: mod_base = OTHER; note = 2'-O-methyluridine-3'-phosphate
  modified_base 21: mod_base = OTHER; note = 2'-O-methylguanosine-3'-phosphorothioate
  modified_base 22: mod_base = OTHER; note = 2'-O-methyladenosine-3'-phosphorothioate
  modified_base 23: mod_base = OTHER; note = 2'-O-methylguanosine
tttagagtgaggattaaaatgag

SEQ ID NO: 109 - RNA, 21 nt, synthetic construct
  source 1..21: mol_type = other RNA
  modified_base 1: mod_base = OTHER; note = 2'-O-methylcytidine-3'-phosphorothioate
  modified_base 2: mod_base = OTHER; note = 2'-O-methyladenosine-3'-phosphorothioate
  modified_base 3: mod_base = OTHER; note = 2'-O-methyluridine-3'-phosphate
  modified_base 4: mod_base = OTHER; note = 2'-O-methyluridine-3'-phosphate
  modified_base 5: mod_base = OTHER; note = 2'-O-methyluridine-3'-phosphate
  modified_base 6: mod_base = OTHER; note = 2'-O-hexadecyl-uridine-3'-phosphate
  modified_base 7: mod_base = OTHER; note = 2'-deoxy-2'-fluoroadenosine-3'-phosphate
  modified_base 8: mod_base = OTHER; note = 2'-O-methyladenosine-3'-phosphate
  modified_base 9: mod_base = OTHER; note = 2'-deoxy-2'-fluorouridine-3'-phosphate
  modified_base 10: mod_base = OTHER; note = 2'-deoxy-2'-fluorocytidine-3'-phosphate
  modified_base 11: mod_base = OTHER; note = 2'-deoxy-2'-fluorocytidine-3'-phosphate
  modified_base 12: mod_base = OTHER; note = 2'-O-methyluridine-3'-phosphate
  modified_base 13: mod_base = OTHER; note = 2'-O-methylcytidine-3'-phosphate
  modified_base 14: mod_base = OTHER; note = 2'-O-methyladenosine-3'-phosphate
  modified_base 15: mod_base = OTHER; note = 2'-O-methylcytidine-3'-phosphate
  modified_base 16: mod_base = OTHER; note = 2'-O-methyluridine-3'-phosphate
  modified_base 17: mod_base = OTHER; note = 2'-O-methylcytidine-3'-phosphate
  modified_base 18: mod_base = OTHER; note = 2'-O-methyluridine-3'-phosphate
  modified_base 19: mod_base = OTHER; note = 2'-O-methyladenosine-3'-phosphorothioate
  modified_base 20: mod_base = OTHER; note = 2'-O-methyladenosine-3'-phosphorothioate
  modified_base 21: mod_base = OTHER; note = 2'-O-methyladenosine
cattttaatcctcactctaaa

SEQ ID NO: 110 - RNA, 23 nt, synthetic construct
  source 1..23: mol_type = other RNA
  modified_base 1: mod_base = OTHER; note = 1-(alpha-L-threofuranosyl)thymine 2'-phosphorothioate-3'-phosphate
  modified_base 2: mod_base = OTHER; note = 2'-deoxy-2'-fluorouridine-3'-phosphorothioate
  modified_base 3: mod_base = OTHER; note = 2'-O-methyluridine-3'-phosphate
  modified_base 4: mod_base = OTHER; note = 2'-O-methyladenosine-3'-phosphate
  modified_base 5: mod_base = OTHER; note = 2'-O-methylguanosine-3'-phosphate
  modified_base 6: mod_base = OTHER; note = 2'-deoxy-2'-fluoroadenosine-3'-phosphate
  modified_base 7: mod_base = OTHER; note = 2'-O-methylguanosine-3'-phosphate
  modified_base 8: mod_base = OTHER; note = 2'-deoxy-2'-fluorouridine-3'-phosphate
  modified_base 9: mod_base = OTHER; note = 2'-deoxy-2'-fluoroguanosine-3'-phosphate
  modified_base 10: mod_base = OTHER; note = 2'-O-methyladenosine-3'-phosphate
  modified_base 11: mod_base = OTHER; note = 2'-O-methylguanosine-3'-phosphate
  modified_base 12: mod_base = OTHER; note = 2'-O-methylguanosine-3'-phosphate
  modified_base 13: mod_base = OTHER; note = 2'-O-methyladenosine-3'-phosphate
  modified_base 14: mod_base = OTHER; note = 2'-deoxy-2'-fluorouridine-3'-phosphate
  modified_base 15: mod_base = OTHER; note = 2'-O-methyluridine-3'-phosphate
  modified_base 16: mod_base = OTHER; note = 2'-deoxy-2'-fluoroadenosine-3'-phosphate
  modified_base 17: mod_base = OTHER; note = 2'-O-methyladenosine-3'-phosphate
  modified_base 18: mod_base = OTHER; note = 2'-O-methyladenosine-3'-phosphate
  modified_base 19: mod_base = OTHER; note = 2'-O-methyladenosine-3'-phosphate
  modified_base 20: mod_base = OTHER; note = 2'-O-methyluridine-3'-phosphate
  modified_base 21: mod_base = OTHER; note = 2'-O-methylguanosine-3'-phosphorothioate
  modified_base 22: mod_base = OTHER; note = 2'-O-methyladenosine-3'-phosphorothioate
  modified_base 23: mod_base = OTHER; note = 2'-O-methylguanosine
tttagagtgaggattaaaatgag

SEQ ID NO: 111 - RNA, 21 nt, synthetic construct
  source 1..21: mol_type = other RNA
  modified_base 1: mod_base = OTHER; note = 2'-O-methyluridine-3'-phosphorothioate
  modified_base 2: mod_base = OTHER; note = 2'-O-methylguanosine-3'-phosphorothioate
  modified_base 3: mod_base = OTHER; note = 2'-O-methylguanosine-3'-phosphate
  modified_base 4: mod_base = OTHER; note = 2'-O-methylguanosine-3'-phosphate
  modified_base 5: mod_base = OTHER; note = 2'-O-methyladenosine-3'-phosphate
  modified_base 6: mod_base = OTHER; note = 2'-O-methyluridine-3'-phosphate
  modified_base 7: mod_base = OTHER; note = 2'-deoxy-2'-fluorouridine-3'-phosphate
  modified_base 8: mod_base = OTHER; note = 2'-O-methyluridine-3'-phosphate
  modified_base 9: mod_base = OTHER; note = 2'-deoxy-2'-fluorocytidine-3'-phosphate
  modified_base 10: mod_base = OTHER; note = 2'-deoxy-2'-fluoroadenosine-3'-phosphate
  modified_base 11: mod_base = OTHER; note = 2'-deoxy-2'-fluorouridine-3'-phosphate
  modified_base 12: mod_base = OTHER; note = 2'-O-methylguanosine-3'-phosphate
  modified_base 13: mod_base = OTHER; note = 2'-O-methyluridine-3'-phosphate
  modified_base 14: mod_base = OTHER; note = 2'-O-methyladenosine-3'-phosphate
  modified_base 15: mod_base = OTHER; note = 2'-O-methyladenosine-3'-phosphate
  modified_base 16: mod_base = OTHER; note = 2'-O-methylcytidine-3'-phosphate
  modified_base 17: mod_base = OTHER; note = 2'-O-methylcytidine-3'-phosphate
  modified_base 18: mod_base = OTHER; note = 2'-O-methyladenosine-3'-phosphate
  modified_base 19: mod_base = OTHER; note = 2'-O-methyladenosine-3'-phosphate
  modified_base 20: mod_base = OTHER; note = 2'-O-methylguanosine-3'-phosphate
  modified_base 21: mod_base = OTHER; note = 2'-O-methyladenosine-3'-phosphate (N-(1-oxo-6-((3beta-cholest-5-en-3-yl)oxcarboxamido)hexyl)- 4-hydroxypyrrolidin-2-yl)methyl ester
tgggatttcatgtaaccaaga

SEQ ID NO: 112 - RNA, 23 nt, synthetic construct
  source 1..23: mol_type = other RNA
  modified_base 1: mod_base = OTHER; note = 2'-O-methyluridine-3'-phosphorothioate 5'-(E)-Vinylphosphonate
  modified_base 2: mod_base = OTHER; note = 2'-deoxy-2'-fluorocytidine-3'-phosphorothioate
  modified_base 3: mod_base = OTHER; note = 2'-O-methyluridine-3'-phosphate
  modified_base 4: mod_base = OTHER; note = 2'-O-methyluridine-3'-phosphate
  modified_base 5: mod_base = OTHER; note = 2'-O-methylguanosine-3'-phosphate
  modified_base 6: mod_base = OTHER; note = 2'-deoxy-2'-fluoroguanosine-3'-phosphate
  modified_base 7: mod_base = OTHER; note = 2'-O-methyluridine-3'-phosphate
  modified_base 8: mod_base = OTHER; note = 2'-O-methyluridine-3'-phosphate
  modified_base 9: mod_base = OTHER; note = 2'-deoxy-2'-fluoroadenosine-3'-phosphate
  modified_base 10: mod_base = OTHER; note = 2'-O-methylcytidine-3'-phosphate
  modified_base 11: mod_base = OTHER; note = 2'-O-methyladenosine-3'-phosphate
  modified_base 12: mod_base = OTHER; note = 2'-O-methyluridine-3'-phosphate
  modified_base 13: mod_base = OTHER; note = 2'-O-methylguanosine-3'-phosphate
  modified_base 14: mod_base = OTHER; note = 2'-deoxy-2'-fluoroadenosine-3'-phosphate
  modified_base 15: mod_base = OTHER; note = 2'-O-methyladenosine-3'-phosphate
  modified_base 16: mod_base = OTHER; note = 2'-deoxy-2'-fluoroadenosine-3'-phosphate
  modified_base 17: mod_base = OTHER; note = 2'-O-methyluridine-3'-phosphate
  modified_base 18: mod_base = OTHER; note = 2'-O-methylcytidine-3'-phosphate
  modified_base 19: mod_base = OTHER; note = 2'-O-methylcytidine-3'-phosphate
  modified_base 20: mod_base = OTHER; note = 2'-O-methylcytidine-3'-phosphate
  modified_base 21: mod_base = OTHER; note = 2'-O-methyladenosine-3'-phosphorothioate
  modified_base 22: mod_base = OTHER; note = 2'-O-methyluridine-3'-phosphorothioate
  modified_base 23: mod_base = OTHER; note = 2'-O-methylcytidine
tcttggttacatgaaatcccatc

SEQ ID NO: 113 - RNA, 21 nt, synthetic construct
  source 1..21: mol_type = other RNA
  modified_base 1: mod_base = OTHER; note = 2'-O-methyluridine-3'-phosphorothioate
  modified_base 2: mod_base = OTHER; note = 2'-O-methylguanosine-3'-phosphorothioate
  modified_base 3: mod_base = OTHER; note = 2'-O-methylguanosine-3'-phosphate
  modified_base 4: mod_base = OTHER; note = 2'-O-methylguanosine-3'-phosphate
  modified_base 5: mod_base = OTHER; note = 2'-O-methyladenosine-3'-phosphate
  modified_base 6: mod_base = OTHER; note = 2'-O-methyluridine-3'-phosphate
  modified_base 7: mod_base = OTHER; note = 2'-deoxy-2'-fluorouridine-3'-phosphate
  modified_base 8: mod_base = OTHER; note = 2'-O-methyluridine-3'-phosphate
  modified_base 9: mod_base = OTHER; note = 2'-deoxy-2'-fluorocytidine-3'-phosphate
  modified_base 10: mod_base = OTHER; note = 2'-deoxy-2'-fluoroadenosine-3'-phosphate
  modified_base 11: mod_base = OTHER; note = 2'-deoxy-2'-fluorouridine-3'-phosphate
  modified_base 12: mod_base = OTHER; note = 2'-O-methylguanosine-3'-phosphate
  modified_base 13: mod_base = OTHER; note = 2'-O-methyluridine-3'-phosphate
  modified_base 14: mod_base = OTHER; note = 2'-O-methyladenosine-3'-phosphate
  modified_base 15: mod_base = OTHER; note = 2'-O-methyladenosine-3'-phosphate
  modified_base 16: mod_base = OTHER; note = 2'-O-methylcytidine-3'-phosphate
  modified_base 17: mod_base = OTHER; note = 2'-O-methylcytidine-3'-phosphate
  modified_base 18: mod_base = OTHER; note = 2'-O-methyladenosine-3'-phosphate
  modified_base 19: mod_base = OTHER; note = 2'-O-methyladenosine-3'-phosphate
  modified_base 20: mod_base = OTHER; note = 2'-O-methylguanosine-3'-phosphate
  modified_base 21: mod_base = OTHER; note = 2'-O-methyladenosine-3'-phosphate (N-(1-oxo-6-((3beta-cholest-5-en-3-yl)oxcarboxamido)hexyl)- 4-hydroxypyrrolidin-2-yl)methyl ester
tgggatttcatgtaaccaaga

SEQ ID NO: 114 - RNA, 23 nt, synthetic construct
  source 1..23: mol_type = other RNA
  modified_base 1: mod_base = OTHER; note = 2'-O-methyluridine-3'-phosphorothioate 5'-phosphate
  modified_base 2: mod_base = OTHER; note = 2'-deoxy-2'-fluorocytidine-3'-phosphorothioate
  modified_base 3: mod_base = OTHER; note = 2'-O-methyluridine-3'-phosphate
  modified_base 4: mod_base = OTHER; note = 2'-O-methyluridine-3'-phosphate
  modified_base 5: mod_base = OTHER; note = 2'-O-methylguanosine-3'-phosphate
  modified_base 6: mod_base = OTHER; note = 2'-deoxy-2'-fluoroguanosine-3'-phosphate
  modified_base 7: mod_base = OTHER; note = 2'-O-methyluridine-3'-phosphate
  modified_base 8: mod_base = OTHER; note = 2'-O-methyluridine-3'-phosphate
  modified_base 9: mod_base = OTHER; note = 2'-deoxy-2'-fluoroadenosine-3'-phosphate
  modified_base 10: mod_base = OTHER; note = 2'-O-methylcytidine-3'-phosphate
  modified_base 11: mod_base = OTHER; note = 2'-O-methyladenosine-3'-phosphate
  modified_base 12: mod_base = OTHER; note = 2'-O-methyluridine-3'-phosphate
  modified_base 13: mod_base = OTHER; note = 2'-O-methylguanosine-3'-phosphate
  modified_base 14: mod_base = OTHER; note = 2'-deoxy-2'-fluoroadenosine-3'-phosphate
  modified_base 15: mod_base = OTHER; note = 2'-O-methyladenosine-3'-phosphate
  modified_base 16: mod_base = OTHER; note = 2'-deoxy-2'-fluoroadenosine-3'-phosphate
  modified_base 17: mod_base = OTHER; note = 2'-O-methyluridine-3'-phosphate
  modified_base 18: mod_base = OTHER; note = 2'-O-methylcytidine-3'-phosphate
  modified_base 19: mod_base = OTHER; note = 2'-O-methylcytidine-3'-phosphate
  modified_base 20: mod_base = OTHER; note = 2'-O-methylcytidine-3'-phosphate
  modified_base 21: mod_base = OTHER; note = 2'-O-methyladenosine-3'-phosphorothioate
  modified_base 22: mod_base = OTHER; note = 2'-O-methyluridine-3'-phosphorothioate
  modified_base 23: mod_base = OTHER; note = 2'-O-methylcytidine
tcttggttacatgaaatcccatc

SEQ ID NO: 115 - RNA, 21 nt, synthetic construct
  source 1..21: mol_type = other RNA
  modified_base 1: mod_base = OTHER; note = 2'-O-methyluridine-3'-phosphorothioate
  modified_base 2: mod_base = OTHER; note = 2'-O-methylguanosine-3'-phosphorothioate
  modified_base 3: mod_base = OTHER; note = 2'-O-methylguanosine-3'-phosphate
  modified_base 4: mod_base = OTHER; note = 2'-O-methylguanosine-3'-phosphate
  modified_base 5: mod_base = OTHER; note = 2'-O-methyladenosine-3'-phosphate
  modified_base 6: mod_base = OTHER; note = 2'-O-methyluridine-3'-phosphate
  modified_base 7: mod_base = OTHER; note = 2'-deoxy-2'-fluorouridine-3'-phosphate
  modified_base 8: mod_base = OTHER; note = 2'-O-methyluridine-3'-phosphate
  modified_base 9: mod_base = OTHER; note = 2'-deoxy-2'-fluorocytidine-3'-phosphate
  modified_base 10: mod_base = OTHER; note = 2'-deoxy-2'-fluoroadenosine-3'-phosphate
  modified_base 11: mod_base = OTHER; note = 2'-deoxy-2'-fluorouridine-3'-phosphate
  modified_base 12: mod_base = OTHER; note = 2'-O-methylguanosine-3'-phosphate
  modified_base 13: mod_base = OTHER; note = 2'-O-methyluridine-3'-phosphate
  modified_base 14: mod_base = OTHER; note = 2'-O-methyladenosine-3'-phosphate
  modified_base 15: mod_base = OTHER; note = 2'-O-methyladenosine-3'-phosphate
  modified_base 16: mod_base = OTHER; note = 2'-O-methylcytidine-3'-phosphate
  modified_base 17: mod_base = OTHER; note = 2'-O-methylcytidine-3'-phosphate
  modified_base 18: mod_base = OTHER; note = 2'-O-methyladenosine-3'-phosphate
  modified_base 19: mod_base = OTHER; note = 2'-O-methyladenosine-3'-phosphate
  modified_base 20: mod_base = OTHER; note = 2'-O-methylguanosine-3'-phosphate
  modified_base 21: mod_base = OTHER; note = 2'-O-methyladenosine-3'-phosphate (N-(1-oxo-6-((3beta-cholest-5-en-3-yl)oxcarboxamido)hexyl)- 4-hydroxypyrrolidin-2-yl)methyl ester
tgggatttcatgtaaccaaga

SEQ ID NO: 116 - RNA, 23 nt, synthetic construct
  source 1..23: mol_type = other RNA
  modified_base 1: mod_base = OTHER; note = 1-(alpha-L-threofuranosyl)thymine 2'-phosphorothioate
  modified_base 2: mod_base = OTHER; note = 2'-deoxy-2'-fluorocytidine-3'-phosphorothioate
  modified_base 3: mod_base = OTHER; note = 2'-O-methyluridine-3'-phosphate
  modified_base 4: mod_base = OTHER; note = 2'-O-methyluridine-3'-phosphate
  modified_base 5: mod_base = OTHER; note = 2'-O-methylguanosine-3'-phosphate
  modified_base 6: mod_base = OTHER; note = 2'-deoxy-2'-fluoroguanosine-3'-phosphate
  modified_base 7: mod_base = OTHER; note = 2'-O-methyluridine-3'-phosphate
  modified_base 8: mod_base = OTHER; note = 2'-O-methyluridine-3'-phosphate
  modified_base 9: mod_base = OTHER; note = 2'-deoxy-2'-fluoroadenosine-3'-phosphate
  modified_base 10: mod_base = OTHER; note = 2'-O-methylcytidine-3'-phosphate
  modified_base 11: mod_base = OTHER; note = 2'-O-methyladenosine-3'-phosphate
  modified_base 12: mod_base = OTHER; note = 2'-O-methyluridine-3'-phosphate
  modified_base 13: mod_base = OTHER; note = 2'-O-methylguanosine-3'-phosphate
  modified_base 14: mod_base = OTHER; note = 2'-deoxy-2'-fluoroadenosine-3'-phosphate
  modified_base 15: mod_base = OTHER; note = 2'-O-methyladenosine-3'-phosphate
  modified_base 16: mod_base = OTHER; note = 2'-deoxy-2'-fluoroadenosine-3'-phosphate
  modified_base 17: mod_base = OTHER; note = 2'-O-methyluridine-3'-phosphate
  modified_base 18: mod_base = OTHER; note = 2'-O-methylcytidine-3'-phosphate
  modified_base 19: mod_base = OTHER; note = 2'-O-methylcytidine-3'-phosphate
  modified_base 20: mod_base = OTHER; note = 2'-O-methylcytidine-3'-phosphate
  modified_base 21: mod_base = OTHER; note = 2'-O-methyladenosine-3'-phosphorothioate
  modified_base 22: mod_base = OTHER; note = 2'-O-methyluridine-3'-phosphorothioate
  modified_base 23: mod_base = OTHER; note = 2'-O-methylcytidine
tcttggttacatgaaatcccatc

SEQ ID NO: 117 - RNA, 21 nt, synthetic construct
  source 1..21: mol_type = other RNA
  modified_base 1: mod_base = OTHER; note = 2'-O-methyluridine-3'-phosphorothioate
  modified_base 2: mod_base = OTHER; note = 2'-O-methylguanosine-3'-phosphorothioate
  modified_base 3: mod_base = OTHER; note = 2'-O-methylguanosine-3'-phosphate
  modified_base 4: mod_base = OTHER; note = 2'-O-methylguanosine-3'-phosphate
  modified_base 5: mod_base = OTHER; note = 2'-O-methyladenosine-3'-phosphate
  modified_base 6: mod_base = OTHER; note = 2'-O-methyluridine-3'-phosphate
  modified_base 7: mod_base = OTHER; note = 2'-deoxy-2'-fluorouridine-3'-phosphate
  modified_base 8: mod_base = OTHER; note = 2'-O-methyluridine-3'-phosphate
  modified_base 9: mod_base = OTHER; note = 2'-deoxy-2'-fluorocytidine-3'-phosphate
  modified_base 10: mod_base = OTHER; note = 2'-deoxy-2'-fluoroadenosine-3'-phosphate
  modified_base 11: mod_base = OTHER; note = 2'-deoxy-2'-fluorouridine-3'-phosphate
  modified_base 12: mod_base = OTHER; note = 2'-O-methylguanosine-3'-phosphate
  modified_base 13: mod_base = OTHER; note = 2'-O-methyluridine-3'-phosphate
  modified_base 14: mod_base = OTHER; note = 2'-O-methyladenosine-3'-phosphate
  modified_base 15: mod_base = OTHER; note = 2'-O-methyladenosine-3'-phosphate
  modified_base 16: mod_base = OTHER; note = 2'-O-methylcytidine-3'-phosphate
  modified_base 17: mod_base = OTHER; note = 2'-O-methylcytidine-3'-phosphate
  modified_base 18: mod_base = OTHER; note = 2'-O-methyladenosine-3'-phosphate
  modified_base 19: mod_base = OTHER; note = 2'-O-methyladenosine-3'-phosphate
  modified_base 20: mod_base = OTHER; note = 2'-O-methylguanosine-3'-phosphate
  modified_base 21: mod_base = OTHER; note = 2'-O-methyladenosine-3'-phosphate (N-(1-oxo-6-((3beta-cholest-5-en-3-yl)oxcarboxamido)hexyl)- 4-hydroxypyrrolidin-2-yl)methyl ester
tgggatttcatgtaaccaaga

SEQ ID NO: 118 - RNA, 23 nt, synthetic construct
  source 1..23: mol_type = other RNA
  modified_base 1: mod_base = OTHER; note = 1-(alpha-L-threofuranosyl)thymine 2'-phosphorothioate-3'-phosphate
  modified_base 2: mod_base = OTHER; note = 2'-deoxy-2'-fluorocytidine-3'-phosphorothioate
  modified_base 3: mod_base = OTHER; note = 2'-O-methyluridine-3'-phosphate
  modified_base 4: mod_base = OTHER; note = 2'-O-methyluridine-3'-phosphate
  modified_base 5: mod_base = OTHER; note = 2'-O-methylguanosine-3'-phosphate
  modified_base 6: mod_base = OTHER; note = 2'-deoxy-2'-fluoroguanosine-3'-phosphate
  modified_base 7: mod_base = OTHER; note = 2'-O-methyluridine-3'-phosphate
  modified_base 8: mod_base = OTHER; note = 2'-O-methyluridine-3'-phosphate
  modified_base 9: mod_base = OTHER; note = 2'-deoxy-2'-fluoroadenosine-3'-phosphate
  modified_base 10: mod_base = OTHER; note = 2'-O-methylcytidine-3'-phosphate
  modified_base 11: mod_base = OTHER; note = 2'-O-methyladenosine-3'-phosphate
  modified_base 12: mod_base = OTHER; note = 2'-O-methyluridine-3'-phosphate
  modified_base 13: mod_base = OTHER; note = 2'-O-methylguanosine-3'-phosphate
  modified_base 14: mod_base = OTHER; note = 2'-deoxy-2'-fluoroadenosine-3'-phosphate
  modified_base 15: mod_base = OTHER; note = 2'-O-methyladenosine-3'-phosphate
  modified_base 16: mod_base = OTHER; note = 2'-deoxy-2'-fluoroadenosine-3'-phosphate
  modified_base 17: mod_base = OTHER; note = 2'-O-methyluridine-3'-phosphate
  modified_base 18: mod_base = OTHER; note = 2'-O-methylcytidine-3'-phosphate
  modified_base 19: mod_base = OTHER; note = 2'-O-methylcytidine-3'-phosphate
  modified_base 20: mod_base = OTHER; note = 2'-O-methylcytidine-3'-phosphate
  modified_base 21: mod_base = OTHER; note = 2'-O-methyladenosine-3'-phosphorothioate
  modified_base 22: mod_base = OTHER; note = 2'-O-methyluridine-3'-phosphorothioate
  modified_base 23: mod_base = OTHER; note = 2'-O-methylcytidine
tcttggttacatgaaatcccatc

SEQ ID NO: 119 - RNA, 21 nt, synthetic construct
  source 1..21: mol_type = other RNA
  modified_base 1: mod_base = OTHER; note = 2'-O-methyladenosine-3'-phosphorothioate
  modified_base 2: mod_base = OTHER; note = 2'-O-methyladenosine-3'-phosphorothioate
  modified_base 3: mod_base = OTHER; note = 2'-O-methylcytidine-3'-phosphate
  modified_base 4: mod_base = OTHER; note = 2'-O-methyladenosine-3'-phosphate
  modified_base 5: mod_base = OTHER; note = 2'-O-methylguanosine-3'-phosphate
  modified_base 6: mod_base = OTHER; note = 2'-O-hexadecyl-uridine-3'-phosphate
  modified_base 7: mod_base = OTHER; note = 2'-deoxy-2'-fluoroguanosine-3'-phosphate
  modified_base 8: mod_base = OTHER; note = 2'-O-methyluridine-3'-phosphate
  modified_base 9: mod_base = OTHER; note = 2'-deoxy-2'-fluorouridine-3'-phosphate
  modified_base 10: mod_base = OTHER; note = 2'-deoxy-2'-fluorocytidine-3'-phosphate
  modified_base 11: mod_base = OTHER; note = 2'-deoxy-2'-fluorouridine-3'-phosphate
  modified_base 12: mod_base = OTHER; note = 2'-O-methyluridine-3'-phosphate
  modified_base 13: mod_base = OTHER; note = 2'-O-methylguanosine-3'-phosphate
  modified_base 14: mod_base = OTHER; note = 2'-O-methylcytidine-3'-phosphate
  modified_base 15: mod_base = OTHER; note = 2'-O-methyluridine-3'-phosphate
  modified_base 16: mod_base = OTHER; note = 2'-O-methylcytidine-3'-phosphate
  modified_base 17: mod_base = OTHER; note = 2'-O-methyluridine-3'-phosphate
  modified_base 18: mod_base = OTHER; note = 2'-O-methyladenosine-3'-phosphate
  modified_base 19: mod_base = OTHER; note = 2'-O-methyluridine-3'-phosphorothioate
  modified_base 20: mod_base = OTHER; note = 2'-O-methyladenosine-3'-phosphorothioate
  modified_base 21: mod_base = OTHER; note = 2'-O-methyladenosine
aacagtgttcttgctctataa

SEQ ID NO: 120 - RNA, 23 nt, synthetic construct
  source 1..23: mol_type = other RNA
  modified_base 1: mod_base = OTHER; note = 2'-O-methyluridine-3'-phosphorothioate 5'-(E)-Vinylphosphonate
  modified_base 2: mod_base = OTHER; note = 2'-deoxy-2'-fluorouridine-3'-phosphorothioate
  modified_base 3: mod_base = OTHER; note = 2'-O-methyladenosine-3'-phosphate
  modified_base 4: mod_base = OTHER; note = 2'-O-methyluridine-3'-phosphate
  modified_base 5: mod_base = OTHER; note = 2'-O-methyladenosine-3'-phosphate
  modified_base 6: mod_base = OTHER; note = 2'-deoxy-2'-fluoroguanosine-3'-phosphate
  modified_base 7: mod_base = OTHER; note = 2'-O-methyladenosine-3'-phosphate
  modified_base 8: mod_base = OTHER; note = 2'-O-methylguanosine-3'-phosphate
  modified_base 9: mod_base = OTHER; note = 2'-O-methylcytidine-3'-phosphate
  modified_base 10: mod_base = OTHER; note = 2'-O-methyladenosine-3'-phosphate
  modified_base 11: mod_base = OTHER; note = 2'-O-methyladenosine-3'-phosphate
  modified_base 12: mod_base = OTHER; note = 2'-O-methylguanosine-3'-phosphate
  modified_base 13: mod_base = OTHER; note = 2'-O-methyladenosine-3'-phosphate
  modified_base 14: mod_base = OTHER; note = 2'-deoxy-2'-fluoroadenosine-3'-phosphate
  modified_base 15: mod_base = OTHER; note = 2'-O-methylcytidine-3'-phosphate
  modified_base 16: mod_base = OTHER; note = 2'-deoxy-2'-fluoroadenosine-3'-phosphate
  modified_base 17: mod_base = OTHER; note = 2'-O-methylcytidine-3'-phosphate
  modified_base 18: mod_base = OTHER; note = 2'-O-methyluridine-3'-phosphate
  modified_base 19: mod_base = OTHER; note = 2'-O-methylguanosine-3'-phosphate
  modified_base 20: mod_base = OTHER; note = 2'-O-methyluridine-3'-phosphate
  modified_base 21: mod_base = OTHER; note = 2'-O-methyluridine-3'-phosphorothioate
  modified_base 22: mod_base = OTHER; note = 2'-O-methyluridine-3'-phosphorothioate
  modified_base 23: mod_base = OTHER; note = 2'-O-methyluridine
ttatagagcaagaacactgtttt

SEQ ID NO: 121 - RNA, 21 nt, synthetic construct
  source 1..21: mol_type = other RNA
  modified_base 1: mod_base = OTHER; note = 2'-O-methyladenosine-3'-phosphorothioate
  modified_base 2: mod_base = OTHER; note = 2'-O-methyladenosine-3'-phosphorothioate
  modified_base 3: mod_base = OTHER; note = 2'-O-methylcytidine-3'-phosphate
  modified_base 4: mod_base = OTHER; note = 2'-O-methyladenosine-3'-phosphate
  modified_base 5: mod_base = OTHER; note = 2'-O-methylguanosine-3'-phosphate
  modified_base 6: mod_base = OTHER; note = 2'-O-hexadecyl-uridine-3'-phosphate
  modified_base 7: mod_base = OTHER; note = 2'-deoxy-2'-fluoroguanosine-3'-phosphate
  modified_base 8: mod_base = OTHER; note = 2'-O-methyluridine-3'-phosphate
  modified_base 9: mod_base = OTHER; note = 2'-deoxy-2'-fluorouridine-3'-phosphate
  modified_base 10: mod_base = OTHER; note = 2'-deoxy-2'-fluorocytidine-3'-phosphate
  modified_base 11: mod_base = OTHER; note = 2'-deoxy-2'-fluorouridine-3'-phosphate
  modified_base 12: mod_base = OTHER; note = 2'-O-methyluridine-3'-phosphate
  modified_base 13: mod_base = OTHER; note = 2'-O-methylguanosine-3'-phosphate
  modified_base 14: mod_base = OTHER; note = 2'-O-methylcytidine-3'-phosphate
  modified_base 15: mod_base = OTHER; note = 2'-O-methyluridine-3'-phosphate
  modified_base 16: mod_base = OTHER; note = 2'-O-methylcytidine-3'-phosphate
  modified_base 17: mod_base = OTHER; note = 2'-O-methyluridine-3'-phosphate
  modified_base 18: mod_base = OTHER; note = 2'-O-methyladenosine-3'-phosphate
  modified_base 19: mod_base = OTHER; note = 2'-O-methyluridine-3'-phosphorothioate
  modified_base 20: mod_base = OTHER; note = 2'-O-methyladenosine-3'-phosphorothioate
  modified_base 21: mod_base = OTHER; note = 2'-O-methyladenosine
aacagtgttcttgctctataa

SEQ ID NO: 122 - RNA, 23 nt, synthetic construct
  source 1..23: mol_type = other RNA
  modified_base 1: mod_base = OTHER; note = 2'-O-methyluridine-3'-phosphorothioate 5'-phosphate
  modified_base 2: mod_base = OTHER; note = 2'-deoxy-2'-fluorouridine-3'-phosphorothioate
  modified_base 3: mod_base = OTHER; note = 2'-O-methyladenosine-3'-phosphate
  modified_base 4: mod_base = OTHER; note = 2'-O-methyluridine-3'-phosphate
  modified_base 5: mod_base = OTHER; note = 2'-O-methyladenosine-3'-phosphate
  modified_base 6: mod_base = OTHER; note = 2'-deoxy-2'-fluoroguanosine-3'-phosphate
  modified_base 7: mod_base = OTHER; note = 2'-O-methyladenosine-3'-phosphate
  modified_base 8: mod_base = OTHER; note = 2'-O-methylguanosine-3'-phosphate
  modified_base 9: mod_base = OTHER; note = 2'-O-methylcytidine-3'-phosphate
  modified_base 10: mod_base = OTHER; note = 2'-O-methyladenosine-3'-phosphate
  modified_base 11: mod_base = OTHER; note = 2'-O-methyladenosine-3'-phosphate
  modified_base 12: mod_base = OTHER; note = 2'-O-methylguanosine-3'-phosphate
  modified_base 13: mod_base = OTHER; note = 2'-O-methyladenosine-3'-phosphate
  modified_base 14: mod_base = OTHER; note = 2'-deoxy-2'-fluoroadenosine-3'-phosphate
  modified_base 15: mod_base = OTHER; note = 2'-O-methylcytidine-3'-phosphate
  modified_base 16: mod_base = OTHER; note = 2'-deoxy-2'-fluoroadenosine-3'-phosphate
  modified_base 17: mod_base = OTHER; note = 2'-O-methylcytidine-3'-phosphate
  modified_base 18: mod_base = OTHER; note = 2'-O-methyluridine-3'-phosphate
  modified_base 19: mod_base = OTHER; note = 2'-O-methylguanosine-3'-phosphate
  modified_base 20: mod_base = OTHER; note = 2'-O-methyluridine-3'-phosphate
  modified_base 21: mod_base = OTHER; note = 2'-O-methyluridine-3'-phosphorothioate
  modified_base 22: mod_base = OTHER; note = 2'-O-methyluridine-3'-phosphorothioate
  modified_base 23: mod_base = OTHER; note = 2'-O-methyluridine
ttatagagcaagaacactgtttt

SEQ ID NO: 123 - RNA, 21 nt, synthetic construct
  source 1..21: mol_type = other RNA
  modified_base 1: mod_base = OTHER; note = 2'-O-methyladenosine-3'-phosphorothioate
  modified_base 2: mod_base = OTHER; note = 2'-O-methyladenosine-3'-phosphorothioate
  modified_base 3: mod_base = OTHER; note = 2'-O-methylcytidine-3'-phosphate
  modified_base 4: mod_base = OTHER; note = 2'-O-methyladenosine-3'-phosphate
  modified_base 5: mod_base = OTHER; note = 2'-O-methylguanosine-3'-phosphate
  modified_base 6: mod_base = OTHER; note = 2'-O-hexadecyl-uridine-3'-phosphate
  modified_base 7: mod_base = OTHER; note = 2'-deoxy-2'-fluoroguanosine-3'-phosphate
  modified_base 8: mod_base = OTHER; note = 2'-O-methyluridine-3'-phosphate
  modified_base 9: mod_base = OTHER; note = 2'-deoxy-2'-fluorouridine-3'-phosphate
  modified_base 10: mod_base = OTHER; note = 2'-deoxy-2'-fluorocytidine-3'-phosphate
  modified_base 11: mod_base = OTHER; note = 2'-deoxy-2'-fluorouridine-3'-phosphate
  modified_base 12: mod_base = OTHER; note = 2'-O-methyluridine-3'-phosphate
  modified_base 13: mod_base = OTHER; note = 2'-O-methylguanosine-3'-phosphate
  modified_base 14: mod_base = OTHER; note = 2'-O-methylcytidine-3'-phosphate
  modified_base 15: mod_base = OTHER; note = 2'-O-methyluridine-3'-phosphate
  modified_base 16: mod_base = OTHER; note = 2'-O-methylcytidine-3'-phosphate
  modified_base 17: mod_base = OTHER; note = 2'-O-methyluridine-3'-phosphate
  modified_base 18: mod_base = OTHER; note = 2'-O-methyladenosine-3'-phosphate
  modified_base 19: mod_base = OTHER; note = 2'-O-methyluridine-3'-phosphorothioate
  modified_base 20: mod_base = OTHER; note = 2'-O-methyladenosine-3'-phosphorothioate
  modified_base 21: mod_base = OTHER; note = 2'-O-methyladenosine
aacagtgttcttgctctataa

SEQ ID NO: 124 - RNA, 23 nt, synthetic construct
  source 1..23: mol_type = other RNA
  modified_base 1: mod_base = OTHER; note = 1-(alpha-L-threofuranosyl)thymine 2'-phosphorothioate
  modified_base 2: mod_base = OTHER; note = 2'-deoxy-2'-fluorouridine-3'-phosphorothioate
  modified_base 3: mod_base = OTHER; note = 2'-O-methyladenosine-3'-phosphate
  modified_base 4: mod_base = OTHER; note = 2'-O-methyluridine-3'-phosphate
  modified_base 5: mod_base = OTHER; note = 2'-O-methyladenosine-3'-phosphate
  modified_base 6: mod_base = OTHER; note = 2'-deoxy-2'-fluoroguanosine-3'-phosphate
  modified_base 7: mod_base = OTHER; note = 2'-O-methyladenosine-3'-phosphate
  modified_base 8: mod_base = OTHER; note = 2'-O-methylguanosine-3'-phosphate
  modified_base 9: mod_base = OTHER; note = 2'-O-methylcytidine-3'-phosphate
  modified_base 10: mod_base = OTHER; note = 2'-O-methyladenosine-3'-phosphate
  modified_base 11: mod_base = OTHER; note = 2'-O-methyladenosine-3'-phosphate
  modified_base 12: mod_base = OTHER; note = 2'-O-methylguanosine-3'-phosphate
  modified_base 13: mod_base = OTHER; note = 2'-O-methyladenosine-3'-phosphate
  modified_base 14: mod_base = OTHER; note = 2'-deoxy-2'-fluoroadenosine-3'-phosphate
  modified_base 15: mod_base = OTHER; note = 2'-O-methylcytidine-3'-phosphate
  modified_base 16: mod_base = OTHER; note = 2'-deoxy-2'-fluoroadenosine-3'-phosphate
  modified_base 17: mod_base = OTHER; note = 2'-O-methylcytidine-3'-phosphate
  modified_base 18: mod_base = OTHER; note = 2'-O-methyluridine-3'-phosphate
  modified_base 19: mod_base = OTHER; note = 2'-O-methylguanosine-3'-phosphate
  modified_base 20: mod_base = OTHER; note = 2'-O-methyluridine-3'-phosphate
  modified_base 21: mod_base = OTHER; note = 2'-O-methyluridine-3'-phosphorothioate
  modified_base 22: mod_base = OTHER; note = 2'-O-methyluridine-3'-phosphorothioate
  modified_base 23: mod_base = OTHER; note = 2'-O-methyluridine
ttatagagcaagaacactgtttt

SEQ ID NO: 125 - RNA, 21 nt, synthetic construct
  source 1..21: mol_type = other RNA
  modified_base 1: mod_base = OTHER; note = 2'-O-methyladenosine-3'-phosphorothioate
  modified_base 2: mod_base = OTHER; note = 2'-O-methyladenosine-3'-phosphorothioate
  modified_base 3: mod_base = OTHER; note = 2'-O-methylcytidine-3'-phosphate
  modified_base 4: mod_base = OTHER; note = 2'-O-methyladenosine-3'-phosphate
  modified_base 5: mod_base = OTHER; note = 2'-O-methylguanosine-3'-phosphate
  modified_base 6: mod_base = OTHER; note = 2'-O-hexadecyl-uridine-3'-phosphate
  modified_base 7: mod_base = OTHER; note = 2'-deoxy-2'-fluoroguanosine-3'-phosphate
  modified_base 8: mod_base = OTHER; note = 2'-O-methyluridine-3'-phosphate
  modified_base 9: mod_base = OTHER; note = 2'-deoxy-2'-fluorouridine-3'-phosphate
  modified_base 10: mod_base = OTHER; note = 2'-deoxy-2'-fluorocytidine-3'-phosphate
  modified_base 11: mod_base = OTHER; note = 2'-deoxy-2'-fluorouridine-3'-phosphate
  modified_base 12: mod_base = OTHER; note = 2'-O-methyluridine-3'-phosphate
  modified_base 13: mod_base = OTHER; note = 2'-O-methylguanosine-3'-phosphate
  modified_base 14: mod_base = OTHER; note = 2'-O-methylcytidine-3'-phosphate
  modified_base 15: mod_base = OTHER; note = 2'-O-methyluridine-3'-phosphate
  modified_base 16: mod_base = OTHER; note = 2'-O-methylcytidine-3'-phosphate
  modified_base 17: mod_base = OTHER; note = 2'-O-methyluridine-3'-phosphate
  modified_base 18: mod_base = OTHER; note = 2'-O-methyladenosine-3'-phosphate
  modified_base 19: mod_base = OTHER; note = 2'-O-methyluridine-3'-phosphorothioate
  modified_base 20: mod_base = OTHER; note = 2'-O-methyladenosine-3'-phosphorothioate
  modified_base 21: mod_base = OTHER; note = 2'-O-methyladenosine
aacagtgttcttgctctataa

SEQ ID NO: 126 - RNA, 23 nt, synthetic construct
  source 1..23: mol_type = other RNA
  modified_base 1: mod_base = OTHER; note = 1-(alpha-L-threofuranosyl)thymine 2'-phosphorothioate-3'-phosphate
  modified_base 2: mod_base = OTHER; note = 2'-deoxy-2'-fluorouridine-3'-phosphorothioate
  modified_base 3: mod_base = OTHER; note = 2'-O-methyladenosine-3'-phosphate
  modified_base 4: mod_base = OTHER; note = 2'-O-methyluridine-3'-phosphate
  modified_base 5: mod_base = OTHER; note = 2'-O-methyladenosine-3'-phosphate
  modified_base 6: mod_base = OTHER; note = 2'-deoxy-2'-fluoroguanosine-3'-phosphate
  modified_base 7: mod_base = OTHER; note = 2'-O-methyladenosine-3'-phosphate
  modified_base 8: mod_base = OTHER; note = 2'-O-methylguanosine-3'-phosphate
  modified_base 9: mod_base = OTHER; note = 2'-O-methylcytidine-3'-phosphate
  modified_base 10: mod_base = OTHER; note = 2'-O-methyladenosine-3'-phosphate
  modified_base 11: mod_base = OTHER; note = 2'-O-methyladenosine-3'-phosphate
  modified_base 12: mod_base = OTHER; note = 2'-O-methylguanosine-3'-phosphate
  modified_base 13: mod_base = OTHER; note = 2'-O-methyladenosine-3'-phosphate
  modified_base 14: mod_base = OTHER; note = 2'-deoxy-2'-fluoroadenosine-3'-phosphate
  modified_base 15: mod_base = OTHER; note = 2'-O-methylcytidine-3'-phosphate
  modified_base 16: mod_base = OTHER; note = 2'-deoxy-2'-fluoroadenosine-3'-phosphate
  modified_base 17: mod_base = OTHER; note = 2'-O-methylcytidine-3'-phosphate
  modified_base 18: mod_base = OTHER; note = 2'-O-methyluridine-3'-phosphate
  modified_base 19: mod_base = OTHER; note = 2'-O-methylguanosine-3'-phosphate
  modified_base 20: mod_base = OTHER; note = 2'-O-methyluridine-3'-phosphate
  modified_base 21: mod_base = OTHER; note = 2'-O-methyluridine-3'-phosphorothioate
  modified_base 22: mod_base = OTHER; note = 2'-O-methyluridine-3'-phosphorothioate
  modified_base 23: mod_base = OTHER; note = 2'-O-methyluridine
ttatagagcaagaacactgtttt

SEQ ID NO: 127 - RNA, 21 nt, synthetic construct
  source 1..21: mol_type = other RNA
  modified_base 1: mod_base = OTHER; note = 2'-O-methyladenosine-3'-phosphorothioate
  modified_base 2: mod_base = OTHER; note = 2'-O-methyluridine-3'-phosphorothioate
  modified_base 3: mod_base = OTHER; note = 2'-O-methylguanosine-3'-phosphate
  modified_base 4: mod_base = OTHER; note = 2'-O-methylguanosine-3'-phosphate
  modified_base 5: mod_base = OTHER; note = 2'-O-methylcytidine-3'-phosphate
  modified_base 6: mod_base = OTHER; note = 2'-O-methyladenosine-3'-phosphate
  modified_base 7: mod_base = OTHER; note = 2'-deoxy-2'-fluoroadenosine-3'-phosphate
  modified_base 8: mod_base = OTHER; note = 2'-O-methyladenosine-3'-phosphate
  modified_base 9: mod_base = OTHER; note = 2'-deoxy-2'-fluoroguanosine-3'-phosphate
  modified_base 10: mod_base = OTHER; note = 2'-deoxy-2'-fluoroadenosine-3'-phosphate
  modified_base 11: mod_base = OTHER; note = 2'-deoxy-2'-fluoroadenosine-3'-phosphate
  modified_base 12: mod_base = OTHER; note = 2'-O-methylcytidine-3'-phosphate
  modified_base 13: mod_base = OTHER; note = 2'-O-methyladenosine-3'-phosphate
  modified_base 14: mod_base = OTHER; note = 2'-O-methyladenosine-3'-phosphate
  modified_base 15: mod_base = OTHER; note = 2'-O-methyladenosine-3'-phosphate
  modified_base 16: mod_base = OTHER; note = 2'-O-methyluridine-3'-phosphate
  modified_base 17: mod_base = OTHER; note = 2'-O-methyladenosine-3'-phosphate
  modified_base 18: mod_base = OTHER; note = 2'-O-methyladenosine-3'-phosphate
  modified_base 19: mod_base = OTHER; note = 2'-O-methyluridine-3'-phosphate
  modified_base 20: mod_base = OTHER; note = 2'-O-methyladenosine-3'-phosphate
  modified_base 21: mod_base = OTHER; note = 2'-O-methyladenosine-3'-phosphate (N-(1-oxo-6-((3beta-cholest-5-en-3-yl)oxcarboxamido)hexyl)- 4-hydroxypyrrolidin-2-yl)methyl ester
atggcaaagaacaaataataa

SEQ ID NO: 128 - RNA, 23 nt, synthetic construct
  source 1..23: mol_type = other RNA
  modified_base 1: mod_base = OTHER; note = 2'-O-methyluridine-3'-phosphorothioate
  modified_base 2: mod_base = OTHER; note = 2'-deoxy-2'-fluorouridine-3'-phosphorothioate
  modified_base 3: mod_base = OTHER; note = 2'-O-methyladenosine-3'-phosphate
  modified_base 4: mod_base = OTHER; note = 2'-O-methyluridine-3'-phosphate
  modified_base 5: mod_base = OTHER; note = 2'-O-methyluridine-3'-phosphate
  modified_base 6: mod_base = OTHER; note = 2'-deoxy-2'-fluoroadenosine-3'-phosphate
  modified_base 7: mod_base = OTHER; note = 2'-O-methyluridine-3'-phosphate
  modified_base 8: mod_base = OTHER; note = 2'-deoxy-2'-fluorouridine-3'-phosphate
  modified_base 9: mod_base = OTHER; note = 2'-deoxy-2'-fluorouridine-3'-phosphate
  modified_base 10: mod_base = OTHER; note = 2'-O-methylguanosine-3'-phosphate
  modified_base 11: mod_base = OTHER; note = 2'-O-methyluridine-3'-phosphate
  modified_base 12: mod_base = OTHER; note = 2'-O-methyluridine-3'-phosphate
  modified_base 13: mod_base = OTHER; note = 2'-O-methylcytidine-3'-phosphate
  modified_base 14: mod_base = OTHER; note = 2'-deoxy-2'-fluorouridine-3'-phosphate
  modified_base 15: mod_base = OTHER; note = 2'-O-methyluridine-3'-phosphate
  modified_base 16: mod_base = OTHER; note = 2'-deoxy-2'-fluorouridine-3'-phosphate
  modified_base 17: mod_base = OTHER; note = 2'-O-methylguanosine-3'-phosphate
  modified_base 18: mod_base = OTHER; note = 2'-O-methylcytidine-3'-phosphate
  modified_base 19: mod_base = OTHER; note = 2'-O-methylcytidine-3'-phosphate
  modified_base 20: mod_base = OTHER; note = 2'-O-methyladenosine-3'-phosphate
  modified_base 21: mod_base = OTHER; note = 2'-O-methyluridine-3'-phosphorothioate
  modified_base 22: mod_base = OTHER; note = 2'-O-methyluridine-3'-phosphorothioate
  modified_base 23: mod_base = OTHER; note = 2'-O-methyladenosine
ttattatttgttctttgccatta

SEQ ID NO: 129 - RNA, 21 nt, synthetic construct
  source 1..21: mol_type = other RNA
  modified_base 1: mod_base = OTHER; note = 2'-O-methyladenosine-3'-phosphorothioate
  modified_base 2: mod_base = OTHER; note = 2'-O-methyluridine-3'-phosphorothioate
  modified_base 3: mod_base = OTHER; note = 2'-O-methylguanosine-3'-phosphate
  modified_base 4: mod_base = OTHER; note = 2'-O-methylguanosine-3'-phosphate
  modified_base 5: mod_base = OTHER; note = 2'-O-methylcytidine-3'-phosphate
  modified_base 6: mod_base = OTHER; note = 2'-O-methyladenosine-3'-phosphate
  modified_base 7: mod_base = OTHER; note = 2'-deoxy-2'-fluoroadenosine-3'-phosphate
  modified_base 8: mod_base = OTHER; note = 2'-O-methyladenosine-3'-phosphate
  modified_base 9: mod_base = OTHER; note = 2'-deoxy-2'-fluoroguanosine-3'-phosphate
  modified_base 10: mod_base = OTHER; note = 2'-deoxy-2'-fluoroadenosine-3'-phosphate
  modified_base 11: mod_base = OTHER; note = 2'-deoxy-2'-fluoroadenosine-3'-phosphate
  modified_base 12: mod_base = OTHER; note = 2'-O-methylcytidine-3'-phosphate
  modified_base 13: mod_base = OTHER; note = 2'-O-methyladenosine-3'-phosphate
  modified_base 14: mod_base = OTHER; note = 2'-O-methyladenosine-3'-phosphate
  modified_base 15: mod_base = OTHER; note = 2'-O-methyladenosine-3'-phosphate
  modified_base 16: mod_base = OTHER; note = 2'-O-methyluridine-3'-phosphate
  modified_base 17: mod_base = OTHER; note = 2'-O-methyladenosine-3'-phosphate
  modified_base 18: mod_base = OTHER; note = 2'-O-methyladenosine-3'-phosphate
  modified_base 19: mod_base = OTHER; note = 2'-O-methyluridine-3'-phosphate
  modified_base 20: mod_base = OTHER; note = 2'-O-methyladenosine-3'-phosphate
  modified_base 21: mod_base = OTHER; note = 2'-O-methyladenosine-3'-phosphate (N-(1-oxo-6-((3beta-cholest-5-en-3-yl)oxcarboxamido)hexyl)- 4-hydroxypyrrolidin-2-yl)methyl ester
atggcaaagaacaaataataa

SEQ ID NO: 130 - RNA, 23 nt, synthetic construct
  source 1..23: mol_type = other RNA
  modified_base 1: mod_base = OTHER; note = 2'-O-methyluridine-3'-phosphorothioate 5'-phosphate
  modified_base 2: mod_base = OTHER; note = 2'-deoxy-2'-fluorouridine-3'-phosphorothioate
  modified_base 3: mod_base = OTHER; note = 2'-O-methyladenosine-3'-phosphate
  modified_base 4: mod_base = OTHER; note = 2'-O-methyluridine-3'-phosphate
  modified_base 5: mod_base = OTHER; note = 2'-O-methyluridine-3'-phosphate
  modified_base 6: mod_base = OTHER; note = 2'-deoxy-2'-fluoroadenosine-3'-phosphate
  modified_base 7: mod_base = OTHER; note = 2'-O-methyluridine-3'-phosphate
  modified_base 8: mod_base = OTHER; note = 2'-deoxy-2'-fluorouridine-3'-phosphate
  modified_base 9: mod_base = OTHER; note = 2'-deoxy-2'-fluorouridine-3'-phosphate
  modified_base 10: mod_base = OTHER; note = 2'-O-methylguanosine-3'-phosphate
  modified_base 11: mod_base = OTHER; note = 2'-O-methyluridine-3'-phosphate
  modified_base 12: mod_base = OTHER; note = 2'-O-methyluridine-3'-phosphate
  modified_base 13: mod_base = OTHER; note = 2'-O-methylcytidine-3'-phosphate
  modified_base 14: mod_base = OTHER; note = 2'-deoxy-2'-fluorouridine-3'-phosphate
  modified_base 15: mod_base = OTHER; note = 2'-O-methyluridine-3'-phosphate
  modified_base 16: mod_base = OTHER; note = 2'-deoxy-2'-fluorouridine-3'-phosphate
  modified_base 17: mod_base = OTHER; note = 2'-O-methylguanosine-3'-phosphate
  modified_base 18: mod_base = OTHER; note = 2'-O-methylcytidine-3'-phosphate
  modified_base 19: mod_base = OTHER; note = 2'-O-methylcytidine-3'-phosphate
  modified_base 20: mod_base = OTHER; note = 2'-O-methyladenosine-3'-phosphate
  modified_base 21: mod_base = OTHER; note = 2'-O-methyluridine-3'-phosphorothioate
  modified_base 22: mod_base = OTHER; note = 2'-O-methyluridine-3'-phosphorothioate
  modified_base 23: mod_base = OTHER; note = 2'-O-methyladenosine
ttattatttgttctttgccatta

SEQ ID NO: 131 - RNA, 21 nt, synthetic construct
  source 1..21: mol_type = other RNA
  modified_base 1: mod_base = OTHER; note = 2'-O-methyladenosine-3'-phosphorothioate
  modified_base 2: mod_base = OTHER; note = 2'-O-methyluridine-3'-phosphorothioate
  modified_base 3: mod_base = OTHER; note = 2'-O-methylguanosine-3'-phosphate
  modified_base 4: mod_base = OTHER; note = 2'-O-methylguanosine-3'-phosphate
  modified_base 5: mod_base = OTHER; note = 2'-O-methylcytidine-3'-phosphate
  modified_base 6: mod_base = OTHER; note = 2'-O-methyladenosine-3'-phosphate
  modified_base 7: mod_base = OTHER; note = 2'-deoxy-2'-fluoroadenosine-3'-phosphate
  modified_base 8: mod_base = OTHER; note = 2'-O-methyladenosine-3'-phosphate
  modified_base 9: mod_base = OTHER; note = 2'-deoxy-2'-fluoroguanosine-3'-phosphate
  modified_base 10: mod_base = OTHER; note = 2'-deoxy-2'-fluoroadenosine-3'-phosphate
  modified_base 11: mod_base = OTHER; note = 2'-deoxy-2'-fluoroadenosine-3'-phosphate
  modified_base 12: mod_base = OTHER; note = 2'-O-methylcytidine-3'-phosphate
  modified_base 13: mod_base = OTHER; note = 2'-O-methyladenosine-3'-phosphate
  modified_base 14: mod_base = OTHER; note = 2'-O-methyladenosine-3'-phosphate
  modified_base 15: mod_base = OTHER; note = 2'-O-methyladenosine-3'-phosphate
  modified_base 16: mod_base = OTHER; note = 2'-O-methyluridine-3'-phosphate
  modified_base 17: mod_base = OTHER; note = 2'-O-methyladenosine-3'-phosphate
  modified_base 18: mod_base = OTHER; note = 2'-O-methyladenosine-3'-phosphate
  modified_base 19: mod_base = OTHER; note = 2'-O-methyluridine-3'-phosphate
  modified_base 20: mod_base = OTHER; note = 2'-O-methyladenosine-3'-phosphate
  modified_base 21: mod_base = OTHER; note = 2'-O-methyladenosine-3'-phosphate (N-(1-oxo-6-((3beta-cholest-5-en-3-yl)oxcarboxamido)hexyl)- 4-hydroxypyrrolidin-2-yl)methyl ester
atggcaaagaacaaataataa

SEQ ID NO: 132 - RNA, 23 nt, synthetic construct
  source 1..23: mol_type = other RNA
  modified_base 1: mod_base = OTHER; note = 1-(alpha-L-threofuranosyl)thymine 2'-phosphorothioate
  modified_base 2: mod_base = OTHER; note = 2'-deoxy-2'-fluorouridine-3'-phosphorothioate
  modified_base 3: mod_base = OTHER; note = 2'-O-methyladenosine-3'-phosphate
  modified_base 4: mod_base = OTHER; note = 2'-O-methyluridine-3'-phosphate
  modified_base 5: mod_base = OTHER; note = 2'-O-methyluridine-3'-phosphate
  modified_base 6: mod_base = OTHER; note = 2'-deoxy-2'-fluoroadenosine-3'-phosphate
  modified_base 7: mod_base = OTHER; note = 2'-O-methyluridine-3'-phosphate
  modified_base 8: mod_base = OTHER; note = 2'-deoxy-2'-fluorouridine-3'-phosphate
  modified_base 9: mod_base = OTHER; note = 2'-deoxy-2'-fluorouridine-3'-phosphate
  modified_base 10: mod_base = OTHER; note = 2'-O-methylguanosine-3'-phosphate
  modified_base 11: mod_base = OTHER; note = 2'-O-methyluridine-3'-phosphate
  modified_base 12: mod_base = OTHER; note = 2'-O-methyluridine-3'-phosphate
  modified_base 13: mod_base = OTHER; note = 2'-O-methylcytidine-3'-phosphate
  modified_base 14: mod_base = OTHER; note = 2'-deoxy-2'-fluorouridine-3'-phosphate
  modified_base 15: mod_base = OTHER; note = 2'-O-methyluridine-3'-phosphate
  modified_base 16: mod_base = OTHER; note = 2'-deoxy-2'-fluorouridine-3'-phosphate
  modified_base 17: mod_base = OTHER; note = 2'-O-methylguanosine-3'-phosphate
  modified_base 18: mod_base = OTHER; note = 2'-O-methylcytidine-3'-phosphate
  modified_base 19: mod_base = OTHER; note = 2'-O-methylcytidine-3'-phosphate
  modified_base 20: mod_base = OTHER; note = 2'-O-methyladenosine-3'-phosphate
  modified_base 21: mod_base = OTHER; note = 2'-O-methyluridine-3'-phosphorothioate
  modified_base 22: mod_base = OTHER; note = 2'-O-methyluridine-3'-phosphorothioate
  modified_base 23: mod_base = OTHER; note = 2'-O-methyladenosine
ttattatttgttctttgccatta

SEQ ID NO: 133 - RNA, 21 nt, synthetic construct
  source 1..21: mol_type = other RNA
  modified_base 1: mod_base = OTHER; note = 2'-O-methyladenosine-3'-phosphorothioate
  modified_base 2: mod_base = OTHER; note = 2'-O-methyluridine-3'-phosphorothioate
  modified_base 3: mod_base = OTHER; note = 2'-O-methylguanosine-3'-phosphate
  modified_base 4: mod_base = OTHER; note = 2'-O-methylguanosine-3'-phosphate
  modified_base 5: mod_base = OTHER; note = 2'-O-methylcytidine-3'-phosphate
  modified_base 6: mod_base = OTHER; note = 2'-O-methyladenosine-3'-phosphate
  modified_base 7: mod_base = OTHER; note = 2'-deoxy-2'-fluoroadenosine-3'-phosphate
  modified_base 8: mod_base = OTHER; note = 2'-O-methyladenosine-3'-phosphate
  modified_base 9: mod_base = OTHER; note = 2'-deoxy-2'-fluoroguanosine-3'-phosphate
  modified_base 10: mod_base = OTHER; note = 2'-deoxy-2'-fluoroadenosine-3'-phosphate
  modified_base 11: mod_base = OTHER; note = 2'-deoxy-2'-fluoroadenosine-3'-phosphate
  modified_base 12: mod_base = OTHER; note = 2'-O-methylcytidine-3'-phosphate
  modified_base 13: mod_base = OTHER; note = 2'-O-methyladenosine-3'-phosphate
  modified_base 14: mod_base = OTHER; note = 2'-O-methyladenosine-3'-phosphate
  modified_base 15: mod_base = OTHER; note = 2'-O-methyladenosine-3'-phosphate
  modified_base 16: mod_base = OTHER; note = 2'-O-methyluridine-3'-phosphate
  modified_base 17: mod_base = OTHER; note = 2'-O-methyladenosine-3'-phosphate
  modified_base 18: mod_base = OTHER; note = 2'-O-methyladenosine-3'-phosphate
  modified_base 19: mod_base = OTHER; note = 2'-O-methyluridine-3'-phosphate
  modified_base 20: mod_base = OTHER; note = 2'-O-methyladenosine-3'-phosphate
  modified_base 21: mod_base = OTHER; note = 2'-O-methyladenosine-3'-phosphate (N-(1-oxo-6-((3beta-cholest-5-en-3-yl)oxcarboxamido)hexyl)- 4-hydroxypyrrolidin-2-yl)methyl ester
atggcaaagaacaaataataa

SEQ ID NO: 134 - RNA, 23 nt, synthetic construct
  source 1..23: mol_type = other RNA
  modified_base 1: mod_base = OTHER; note = 1-(alpha-L-threofuranosyl)thymine 2'-phosphorothioate-3'-phosphate
  modified_base 2: mod_base = OTHER; note = 2'-deoxy-2'-fluorouridine-3'-phosphorothioate
  modified_base 3: mod_base = OTHER; note = 2'-O-methyladenosine-3'-phosphate
  modified_base 4: mod_base = OTHER; note = 2'-O-methyluridine-3'-phosphate
  modified_base 5: mod_base = OTHER; note = 2'-O-methyluridine-3'-phosphate
  modified_base 6: mod_base = OTHER; note = 2'-deoxy-2'-fluoroadenosine-3'-phosphate
  modified_base 7: mod_base = OTHER; note = 2'-O-methyluridine-3'-phosphate
  modified_base 8: mod_base = OTHER; note = 2'-deoxy-2'-fluorouridine-3'-phosphate
  modified_base 9: mod_base = OTHER; note = 2'-deoxy-2'-fluorouridine-3'-phosphate
  modified_base 10: mod_base = OTHER; note = 2'-O-methylguanosine-3'-phosphate
  modified_base 11: mod_base = OTHER; note = 2'-O-methyluridine-3'-phosphate
  modified_base 12: mod_base = OTHER; note = 2'-O-methyluridine-3'-phosphate
  modified_base 13: mod_base = OTHER; note = 2'-O-methylcytidine-3'-phosphate
  modified_base 14: mod_base = OTHER; note = 2'-deoxy-2'-fluorouridine-3'-phosphate
  modified_base 15: mod_base = OTHER; note = 2'-O-methyluridine-3'-phosphate
  modified_base 16: mod_base = OTHER; note = 2'-deoxy-2'-fluorouridine-3'-phosphate
  modified_base 17: mod_base = OTHER; note = 2'-O-methylguanosine-3'-phosphate
  modified_base 18: mod_base = OTHER; note = 2'-O-methylcytidine-3'-phosphate
  modified_base 19: mod_base = OTHER; note = 2'-O-methylcytidine-3'-phosphate
  modified_base 20: mod_base = OTHER; note = 2'-O-methyladenosine-3'-phosphate
  modified_base 21: mod_base = OTHER; note = 2'-O-methyluridine-3'-phosphorothioate
  modified_base 22: mod_base = OTHER; note = 2'-O-methyluridine-3'-phosphorothioate
  modified_base 23: mod_base = OTHER; note = 2'-O-methyladenosine
ttattatttgttctttgccatta

SEQ ID NO: 135 - RNA, 21 nt, synthetic construct
  source 1..21: mol_type = other RNA
  modified_base 1: mod_base = OTHER; note = 4'-(S)-methyl-9-(alpha-L-threofuranosyl)adenine 2'- phosphorothioate
  modified_base 2: mod_base = OTHER; note = 2'-O-methyladenosine-3'-phosphorothioate
  modified_base 3: mod_base = OTHER; note = 2'-deoxy-2'-fluorocytidine-3'-phosphate
  modified_base 4: mod_base = OTHER; note = 2'-O-methyladenosine-3'-phosphate
  modified_base 5: mod_base = OTHER; note = 2'-deoxy-2'-fluoroguanosine-3'-phosphate
  modified_base 6: mod_base = OTHER; note = 2'-O-methyluridine-3'-phosphate
  modified_base 7: mod_base = OTHER; note = 2'-deoxy-2'-fluoroguanosine-3'-phosphate
  modified_base 8: mod_base = OTHER; note = 2'-O-methyluridine-3'-phosphate
  modified_base 9: mod_base = OTHER; note = 2'-deoxy-2'-fluorouridine-3'-phosphate
  modified_base 10: mod_base = OTHER; note = 2'-deoxy-2'-fluorocytidine-3'-phosphate
  modified_base 11: mod_base = OTHER; note = 2'-deoxy-2'-fluorouridine-3'-phosphate
  modified_base 12: mod_base = OTHER; note = 2'-O-methyluridine-3'-phosphate
  modified_base 13: mod_base = OTHER; note = 2'-deoxy-2'-fluoroguanosine-3'-phosphate
  modified_base 14: mod_base = OTHER; note = 2'-O-methylcytidine-3'-phosphate
  modified_base 15: mod_base = OTHER; note = 2'-deoxy-2'-fluorouridine-3'-phosphate
  modified_base 16: mod_base = OTHER; note = 2'-O-methylcytidine-3'-phosphate
  modified_base 17: mod_base = OTHER; note = 2'-deoxy-2'-fluorouridine-3'-phosphate
  modified_base 18: mod_base = OTHER; note = 2'-O-methyladenosine-3'-phosphate
  modified_base 19: mod_base = OTHER; note = 2'-deoxy-2'-fluorouridine-3'-phosphate
  modified_base 20: mod_base = OTHER; note = 2'-O-methyladenosine-3'-phosphate
  modified_base 21: mod_base = OTHER; note = 2'-deoxy-2'-fluoroadenosine-3'-phosphate ((2S,4R)-1-[29-[[2-(acetylamino)-2-deoxy-beta-D-galactopyra nosyl]oxy]-14,14-bis[[3-[[3-[[5-[[2-(acetylamino)-2-deoxy-b eta-D-galactopyranosyl]oxy]-1-oxopentyl]amino]propyl]amino] -3-oxopropoxy]methyl]-1,12,19,25-tetraoxo-16-oxa-13,20,24-t riazanonacos-1-yl]-4-hydroxy-2-pyrrolidinyl)methyl ester
aacagtgttcttgctctataa

SEQ ID NO: 136 - RNA, 21 nt, synthetic construct
  source 1..21: mol_type = other RNA
  modified_base 1: mod_base = OTHER; note = 2'-deoxy-2'-fluoroadenosine-3'-phosphorothioate
  modified_base 2: mod_base = OTHER; note = 4'-(S)-methyl-9-(alpha-L-threofuranosyl)adenine 2'- phosphorothioate
  modified_base 3: mod_base = OTHER; note = 2'-deoxy-2'-fluorocytidine-3'-phosphate
  modified_base 4: mod_base = OTHER; note = 2'-O-methyladenosine-3'-phosphate
  modified_base 5: mod_base = OTHER; note = 2'-deoxy-2'-fluoroguanosine-3'-phosphate
  modified_base 6: mod_base = OTHER; note = 2'-O-methyluridine-3'-phosphate
  modified_base 7: mod_base = OTHER; note = 2'-deoxy-2'-fluoroguanosine-3'-phosphate
  modified_base 8: mod_base = OTHER; note = 2'-O-methyluridine-3'-phosphate
  modified_base 9: mod_base = OTHER; note = 2'-deoxy-2'-fluorouridine-3'-phosphate
  modified_base 10: mod_base = OTHER; note = 2'-deoxy-2'-fluorocytidine-3'-phosphate
  modified_base 11: mod_base = OTHER; note = 2'-deoxy-2'-fluorouridine-3'-phosphate
  modified_base 12: mod_base = OTHER; note = 2'-O-methyluridine-3'-phosphate
  modified_base 13: mod_base = OTHER; note = 2'-deoxy-2'-fluoroguanosine-3'-phosphate
  modified_base 14: mod_base = OTHER; note = 2'-O-methylcytidine-3'-phosphate
  modified_base 15: mod_base = OTHER; note = 2'-deoxy-2'-fluorouridine-3'-phosphate
  modified_base 16: mod_base = OTHER; note = 2'-O-methylcytidine-3'-phosphate
  modified_base 17: mod_base = OTHER; note = 2'-deoxy-2'-fluorouridine-3'-phosphate
  modified_base 18: mod_base = OTHER; note = 2'-O-methyladenosine-3'-phosphate
  modified_base 19: mod_base = OTHER; note = 2'-deoxy-2'-fluorouridine-3'-phosphate
  modified_base 20: mod_base = OTHER; note = 2'-O-methyladenosine-3'-phosphate
  modified_base 21: mod_base = OTHER; note = 2'-deoxy-2'-fluoroadenosine-3'-phosphate ((2S,4R)-1-[29-[[2-(acetylamino)-2-deoxy-beta-D-galactopyra nosyl]oxy]-14,14-bis[[3-[[3-[[5-[[2-(acetylamino)-2-deoxy-b eta-D-galactopyranosyl]oxy]-1-oxopentyl]amino]propyl]amino] -3-oxopropoxy]methyl]-1,12,19,25-tetraoxo-16-oxa-13,20,24-t riazanonacos-1-yl]-4-hydroxy-2-pyrrolidinyl)methyl ester
aacagtgttcttgctctataa

SEQ ID NO: 137 - RNA, 21 nt, synthetic construct
  source 1..21: mol_type = other RNA
  modified_base 1: mod_base = OTHER; note = 2'-deoxy-2'-fluoroadenosine-3'-phosphorothioate
  modified_base 2: mod_base = OTHER; note = 2'-O-methyladenosine-3'-phosphorothioate
  modified_base 3: mod_base = OTHER; note = 4'-(S)-methyl-1-(alpha-L-threofuranosyl)cytosine 2'-phosphate
  modified_base 4: mod_base = OTHER; note = 2'-O-methyladenosine-3'-phosphate
  modified_base 5: mod_base = OTHER; note = 2'-deoxy-2'-fluoroguanosine-3'-phosphate
  modified_base 6: mod_base = OTHER; note = 2'-O-methyluridine-3'-phosphate
  modified_base 7: mod_base = OTHER; note = 2'-deoxy-2'-fluoroguanosine-3'-phosphate
  modified_base 8: mod_base = OTHER; note = 2'-O-methyluridine-3'-phosphate
  modified_base 9: mod_base = OTHER; note = 2'-deoxy-2'-fluorouridine-3'-phosphate
  modified_base 10: mod_base = OTHER; note = 2'-deoxy-2'-fluorocytidine-3'-phosphate
  modified_base 11: mod_base = OTHER; note = 2'-deoxy-2'-fluorouridine-3'-phosphate
  modified_base 12: mod_base = OTHER; note = 2'-O-methyluridine-3'-phosphate
  modified_base 13: mod_base = OTHER; note = 2'-deoxy-2'-fluoroguanosine-3'-phosphate
  modified_base 14: mod_base = OTHER; note = 2'-O-methylcytidine-3'-phosphate
  modified_base 15: mod_base = OTHER; note = 2'-deoxy-2'-fluorouridine-3'-phosphate
  modified_base 16: mod_base = OTHER; note = 2'-O-methylcytidine-3'-phosphate
  modified_base 17: mod_base = OTHER; note = 2'-deoxy-2'-fluorouridine-3'-phosphate
  modified_base 18: mod_base = OTHER; note = 2'-O-methyladenosine-3'-phosphate
  modified_base 19: mod_base = OTHER; note = 2'-deoxy-2'-fluorouridine-3'-phosphate
  modified_base 20: mod_base = OTHER; note = 2'-O-methyladenosine-3'-phosphate
  modified_base 21: mod_base = OTHER; note = 2'-deoxy-2'-fluoroadenosine-3'-phosphate ((2S,4R)-1-[29-[[2-(acetylamino)-2-deoxy-beta-D-galactopyra nosyl]oxy]-14,14-bis[[3-[[3-[[5-[[2-(acetylamino)-2-deoxy-b eta-D-galactopyranosyl]oxy]-1-oxopentyl]amino]propyl]amino] -3-oxopropoxy]methyl]-1,12,19,25-tetraoxo-16-oxa-13,20,24-t riazanonacos-1-yl]-4-hydroxy-2-pyrrolidinyl)methyl ester
aacagtgttcttgctctataa

SEQ ID NO: 138 - RNA, 21 nt, synthetic construct
  source 1..21: mol_type = other RNA
  modified_base 1: mod_base = OTHER; note = 2'-deoxy-2'-fluoroadenosine-3'-phosphorothioate
  modified_base 2: mod_base = OTHER; note = 2'-O-methyladenosine-3'-phosphorothioate
  modified_base 3: mod_base = OTHER; note = 2'-deoxy-2'-fluorocytidine-3'-phosphate
  modified_base 4: mod_base = OTHER; note = 4'-(S)-methyl-9-(alpha-L-threofuranosyl)adenine 2'-phosphate
  modified_base 5: mod_base = OTHER; note = 2'-deoxy-2'-fluoroguanosine-3'-phosphate
  modified_base 6: mod_base = OTHER; note = 2'-O-methyluridine-3'-phosphate
  modified_base 7: mod_base = OTHER; note = 2'-deoxy-2'-fluoroguanosine-3'-phosphate
  modified_base 8: mod_base = OTHER; note = 2'-O-methyluridine-3'-phosphate
  modified_base 9: mod_base = OTHER; note = 2'-deoxy-2'-fluorouridine-3'-phosphate
  modified_base 10: mod_base = OTHER; note = 2'-deoxy-2'-fluorocytidine-3'-phosphate
  modified_base 11: mod_base = OTHER; note = 2'-deoxy-2'-fluorouridine-3'-phosphate
  modified_base 12: mod_base = OTHER; note = 2'-O-methyluridine-3'-phosphate
  modified_base 13: mod_base = OTHER; note = 2'-deoxy-2'-fluoroguanosine-3'-phosphate
  modified_base 14: mod_base = OTHER; note = 2'-O-methylcytidine-3'-phosphate
  modified_base 15: mod_base = OTHER; note = 2'-deoxy-2'-fluorouridine-3'-phosphate
  modified_base 16: mod_base = OTHER; note = 2'-O-methylcytidine-3'-phosphate
  modified_base 17: mod_base = OTHER; note = 2'-deoxy-2'-fluorouridine-3'-phosphate
  modified_base 18: mod_base = OTHER; note = 2'-O-methyladenosine-3'-phosphate
  modified_base 19: mod_base = OTHER; note = 2'-deoxy-2'-fluorouridine-3'-phosphate
  modified_base 20: mod_base = OTHER; note = 2'-O-methyladenosine-3'-phosphate
  modified_base 21: mod_base = OTHER; note = 2'-deoxy-2'-fluoroadenosine-3'-phosphate ((2S,4R)-1-[29-[[2-(acetylamino)-2-deoxy-beta-D-galactopyra nosyl]oxy]-14,14-bis[[3-[[3-[[5-[[2-(acetylamino)-2-deoxy-b eta-D-galactopyranosyl]oxy]-1-oxopentyl]amino]propyl]amino] -3-oxopropoxy]methyl]-1,12,19,25-tetraoxo-16-oxa-13,20,24-t riazanonacos-1-yl]-4-hydroxy-2-pyrrolidinyl)methyl ester
aacagtgttcttgctctataa

SEQ ID NO: 139 - RNA, 21 nt, synthetic construct
  source 1..21: mol_type = other RNA
  modified_base 1: mod_base = OTHER; note = 2'-deoxy-2'-fluoroadenosine-3'-phosphorothioate
  modified_base 2: mod_base = OTHER; note = 2'-O-methyladenosine-3'-phosphorothioate
  modified_base 3: mod_base = OTHER; note = 2'-deoxy-2'-fluorocytidine-3'-phosphate
  modified_base 4: mod_base = OTHER; note = 2'-O-methyladenosine-3'-phosphate
  modified_base 5: mod_base = OTHER; note = 4'-(S)-methyl-9-(alpha-L-threofuranosyl)guanine 2'-phosphate
  modified_base 6: mod_base = OTHER; note = 2'-O-methyluridine-3'-phosphate
  modified_base 7: mod_base = OTHER; note = 2'-deoxy-2'-fluoroguanosine-3'-phosphate
  modified_base 8: mod_base = OTHER; note = 2'-O-methyluridine-3'-phosphate
  modified_base 9: mod_base = OTHER; note = 2'-deoxy-2'-fluorouridine-3'-phosphate
  modified_base 10: mod_base = OTHER; note = 2'-deoxy-2'-fluorocytidine-3'-phosphate
  modified_base 11: mod_base = OTHER; note = 2'-deoxy-2'-fluorouridine-3'-phosphate
  modified_base 12: mod_base = OTHER; note = 2'-O-methyluridine-3'-phosphate
  modified_base 13: mod_base = OTHER; note = 2'-deoxy-2'-fluoroguanosine-3'-phosphate
  modified_base 14: mod_base = OTHER; note = 2'-O-methylcytidine-3'-phosphate
  modified_base 15: mod_base = OTHER; note = 2'-deoxy-2'-fluorouridine-3'-phosphate
  modified_base 16: mod_base = OTHER; note = 2'-O-methylcytidine-3'-phosphate
  modified_base 17: mod_base = OTHER; note = 2'-deoxy-2'-fluorouridine-3'-phosphate
  modified_base 18: mod_base = OTHER; note = 2'-O-methyladenosine-3'-phosphate
  modified_base 19: mod_base = OTHER; note = 2'-deoxy-2'-fluorouridine-3'-phosphate
  modified_base 20: mod_base = OTHER; note = 2'-O-methyladenosine-3'-phosphate
  modified_base 21: mod_base = OTHER; note = 2'-deoxy-2'-fluoroadenosine-3'-phosphate ((2S,4R)-1-[29-[[2-(acetylamino)-2-deoxy-beta-D-galactopyra nosyl]oxy]-14,14-bis[[3-[[3-[[5-[[2-(acetylamino)-2-deoxy-b eta-D-galactopyranosyl]oxy]-1-oxopentyl]amino]propyl]amino] -3-oxopropoxy]methyl]-1,12,19,25-tetraoxo-16-oxa-13,20,24-t riazanonacos-1-yl]-4-hydroxy-2-pyrrolidinyl)methyl ester
aacagtgttcttgctctataa

SEQ ID NO: 140 - RNA, 21 nt, synthetic construct
  source 1..21: mol_type = other RNA
  modified_base 1: mod_base = OTHER; note = 2'-deoxy-2'-fluoroadenosine-3'-phosphorothioate
  modified_base 2: mod_base = OTHER; note = 2'-O-methyladenosine-3'-phosphorothioate
  modified_base 3: mod_base = OTHER; note = 2'-deoxy-2'-fluorocytidine-3'-phosphate
  modified_base 4: mod_base = OTHER; note = 2'-O-methyladenosine-3'-phosphate
  modified_base 5: mod_base = OTHER; note = 2'-deoxy-2'-fluoroguanosine-3'-phosphate
  modified_base 6: mod_base = OTHER; note = 4'-(S)-methyl-1-(alpha-L-threofuranosyl)thymine 2'-phosphate
  modified_base 7: mod_base = OTHER; note = 2'-deoxy-2'-fluoroguanosine-3'-phosphate
  modified_base 8: mod_base = OTHER; note = 2'-O-methyluridine-3'-phosphate
  modified_base 9: mod_base = OTHER; note = 2'-deoxy-2'-fluorouridine-3'-phosphate
  modified_base 10: mod_base = OTHER; note = 2'-deoxy-2'-fluorocytidine-3'-phosphate
  modified_base 11: mod_base = OTHER; note = 2'-deoxy-2'-fluorouridine-3'-phosphate
  modified_base 12: mod_base = OTHER; note = 2'-O-methyluridine-3'-phosphate
  modified_base 13: mod_base = OTHER; note = 2'-deoxy-2'-fluoroguanosine-3'-phosphate
  modified_base 14: mod_base = OTHER; note = 2'-O-methylcytidine-3'-phosphate
  modified_base 15: mod_base = OTHER; note = 2'-deoxy-2'-fluorouridine-3'-phosphate
  modified_base 16: mod_base = OTHER; note = 2'-O-methylcytidine-3'-phosphate
  modified_base 17: mod_base = OTHER; note = 2'-deoxy-2'-fluorouridine-3'-phosphate
  modified_base 18: mod_base = OTHER; note = 2'-O-methyladenosine-3'-phosphate
  modified_base 19: mod_base = OTHER; note = 2'-deoxy-2'-fluorouridine-3'-phosphate
  modified_base 20: mod_base = OTHER; note = 2'-O-methyladenosine-3'-phosphate
  modified_base 21: mod_base = OTHER; note = 2'-deoxy-2'-fluoroadenosine-3'-phosphate ((2S,4R)-1-[29-[[2-(acetylamino)-2-deoxy-beta-D-galactopyra nosyl]oxy]-14,14-bis[[3-[[3-[[5-[[2-(acetylamino)-2-deoxy-b eta-D-galactopyranosyl]oxy]-1-oxopentyl]amino]propyl]amino] -3-oxopropoxy]methyl]-1,12,19,25-tetraoxo-16-oxa-13,20,24-t riazanonacos-1-yl]-4-hydroxy-2-pyrrolidinyl)methyl ester
aacagtgttcttgctctataa

SEQ ID NO: 141 - RNA, 21 nt, synthetic construct
  source 1..21: mol_type = other RNA
  modified_base 1: mod_base = OTHER; note = 2'-deoxy-2'-fluoroadenosine-3'-phosphorothioate
  modified_base 2: mod_base = OTHER; note = 2'-O-methyladenosine-3'-phosphorothioate
  modified_base 3: mod_base = OTHER; note = 2'-deoxy-2'-fluorocytidine-3'-phosphate
  modified_base 4: mod_base = OTHER; note = 2'-O-methyladenosine-3'-phosphate
  modified_base 5: mod_base = OTHER; note = 2'-deoxy-2'-fluoroguanosine-3'-phosphate
  modified_base 6: mod_base = OTHER; note = 2'-O-methyluridine-3'-phosphate
  modified_base 7: mod_base = OTHER; note = 4'-(S)-methyl-9-(alpha-L-threofuranosyl)guanine 2'-phosphate
  modified_base 8: mod_base = OTHER; note = 2'-O-methyluridine-3'-phosphate
  modified_base 9: mod_base = OTHER; note = 2'-deoxy-2'-fluorouridine-3'-phosphate
  modified_base 10: mod_base = OTHER; note = 2'-deoxy-2'-fluorocytidine-3'-phosphate
  modified_base 11: mod_base = OTHER; note = 2'-deoxy-2'-fluorouridine-3'-phosphate
  modified_base 12: mod_base = OTHER; note = 2'-O-methyluridine-3'-phosphate
  modified_base 13: mod_base = OTHER; note = 2'-deoxy-2'-fluoroguanosine-3'-phosphate
  modified_base 14: mod_base = OTHER; note = 2'-O-methylcytidine-3'-phosphate
  modified_base 15: mod_base = OTHER; note = 2'-deoxy-2'-fluorouridine-3'-phosphate
  modified_base 16: mod_base = OTHER; note = 2'-O-methylcytidine-3'-phosphate
  modified_base 17: mod_base = OTHER; note = 2'-deoxy-2'-fluorouridine-3'-phosphate
  modified_base 18: mod_base = OTHER; note = 2'-O-methyladenosine-3'-phosphate
  modified_base 19: mod_base = OTHER; note = 2'-deoxy-2'-fluorouridine-3'-phosphate
  modified_base 20: mod_base = OTHER; note = 2'-O-methyladenosine-3'-phosphate
  modified_base 21: mod_base = OTHER; note = 2'-deoxy-2'-fluoroadenosine-3'-phosphate ((2S,4R)-1-[29-[[2-(acetylamino)-2-deoxy-beta-D-galactopyra nosyl]oxy]-14,14-bis[[3-[[3-[[5-[[2-(acetylamino)-2-deoxy-b eta-D-galactopyranosyl]oxy]-1-oxopentyl]amino]propyl]amino] -3-oxopropoxy]methyl]-1,12,19,25-tetraoxo-16-oxa-13,20,24-t riazanonacos-1-yl]-4-hydroxy-2-pyrrolidinyl)methyl ester
aacagtgttcttgctctataa

SEQ ID NO: 142 - RNA, 21 nt, synthetic construct
  source 1..21: mol_type = other RNA
  modified_base 1: mod_base = OTHER; note = 2'-deoxy-2'-fluoroadenosine-3'-phosphorothioate
  modified_base 2: mod_base = OTHER; note = 2'-O-methyladenosine-3'-phosphorothioate
  modified_base 3: mod_base = OTHER; note = 2'-deoxy-2'-fluorocytidine-3'-phosphate
  modified_base 4: mod_base = OTHER; note = 2'-O-methyladenosine-3'-phosphate
  modified_base 5: mod_base = OTHER; note = 2'-deoxy-2'-fluoroguanosine-3'-phosphate
  modified_base 6: mod_base = OTHER; note = 2'-O-methyluridine-3'-phosphate
  modified_base 7: mod_base = OTHER; note = 2'-deoxy-2'-fluoroguanosine-3'-phosphate
  modified_base 8: mod_base = OTHER; note = 4'-(S)-methyl-1-(alpha-L-threofuranosyl)thymine 2'-phosphate
  modified_base 9: mod_base = OTHER; note = 2'-deoxy-2'-fluorouridine-3'-phosphate
  modified_base 10: mod_base = OTHER; note = 2'-deoxy-2'-fluorocytidine-3'-phosphate
  modified_base 11: mod_base = OTHER; note = 2'-deoxy-2'-fluorouridine-3'-phosphate
  modified_base 12: mod_base = OTHER; note = 2'-O-methyluridine-3'-phosphate
  modified_base 13: mod_base = OTHER; note = 2'-deoxy-2'-fluoroguanosine-3'-phosphate
  modified_base 14: mod_base = OTHER; note = 2'-O-methylcytidine-3'-phosphate
  modified_base 15: mod_base = OTHER; note = 2'-deoxy-2'-fluorouridine-3'-phosphate
  modified_base 16: mod_base = OTHER; note = 2'-O-methylcytidine-3'-phosphate
  modified_base 17: mod_base = OTHER; note = 2'-deoxy-2'-fluorouridine-3'-phosphate
  modified_base 18: mod_base = OTHER; note = 2'-O-methyladenosine-3'-phosphate
  modified_base 19: mod_base = OTHER; note = 2'-deoxy-2'-fluorouridine-3'-phosphate
  modified_base 20: mod_base = OTHER; note = 2'-O-methyladenosine-3'-phosphate
  modified_base 21: mod_base = OTHER; note = 2'-deoxy-2'-fluoroadenosine-3'-phosphate ((2S,4R)-1-[29-[[2-(acetylamino)-2-deoxy-beta-D-galactopyra nosyl]oxy]-14,14-bis[[3-[[3-[[5-[[2-(acetylamino)-2-deoxy-b eta-D-galactopyranosyl]oxy]-1-oxopentyl]amino]propyl]amino] -3-oxopropoxy]methyl]-1,12,19,25-tetraoxo-16-oxa-13,20,24-t riazanonacos-1-yl]-4-hydroxy-2-pyrrolidinyl)methyl ester
aacagtgttcttgctctataa

SEQ ID NO: 143 - RNA, 21 nt, synthetic construct
  source 1..21: mol_type = other RNA
  modified_base 1: mod_base = OTHER; note = 2'-deoxy-2'-fluoroadenosine-3'-phosphorothioate
  modified_base 2: mod_base = OTHER; note = 2'-O-methyladenosine-3'-phosphorothioate
  modified_base 3: mod_base = OTHER; note = 2'-deoxy-2'-fluorocytidine-3'-phosphate
  modified_base 4: mod_base = OTHER; note = 2'-O-methyladenosine-3'-phosphate
  modified_base 5: mod_base = OTHER; note = 2'-deoxy-2'-fluoroguanosine-3'-phosphate
  modified_base 6: mod_base = OTHER; note = 2'-O-methyluridine-3'-phosphate
  modified_base 7: mod_base = OTHER; note = 2'-deoxy-2'-fluoroguanosine-3'-phosphate
  modified_base 8: mod_base = OTHER; note = 2'-O-methyluridine-3'-phosphate
  modified_base 9: mod_base = OTHER; note = 4'-(S)-methyl-1-(alpha-L-threofuranosyl)thymine 2'-phosphate
  modified_base 10: mod_base = OTHER; note = 2'-deoxy-2'-fluorocytidine-3'-phosphate
  modified_base 11: mod_base = OTHER; note = 2'-deoxy-2'-fluorouridine-3'-phosphate
  modified_base 12: mod_base = OTHER; note = 2'-O-methyluridine-3'-phosphate
  modified_base 13: mod_base = OTHER; note = 2'-deoxy-2'-fluoroguanosine-3'-phosphate
  modified_base 14: mod_base = OTHER; note = 2'-O-methylcytidine-3'-phosphate
  modified_base 15: mod_base = OTHER; note = 2'-deoxy-2'-fluorouridine-3'-phosphate
  modified_base 16: mod_base = OTHER; note = 2'-O-methylcytidine-3'-phosphate
  modified_base 17: mod_base = OTHER; note = 2'-deoxy-2'-fluorouridine-3'-phosphate
  modified_base 18: mod_base = OTHER; note = 2'-O-methyladenosine-3'-phosphate
  modified_base 19: mod_base = OTHER; note = 2'-deoxy-2'-fluorouridine-3'-phosphate
  modified_base 20: mod_base = OTHER; note = 2'-O-methyladenosine-3'-phosphate
  modified_base 21: mod_base = OTHER; note = 2'-deoxy-2'-fluoroadenosine-3'-phosphate ((2S,4R)-1-[29-[[2-(acetylamino)-2-deoxy-beta-D-galactopyra nosyl]oxy]-14,14-bis[[3-[[3-[[5-[[2-(acetylamino)-2-deoxy-b eta-D-galactopyranosyl]oxy]-1-oxopentyl]amino]propyl]amino] -3-oxopropoxy]methyl]-1,12,19,25-tetraoxo-16-oxa-13,20,24-t riazanonacos-1-yl]-4-hydroxy-2-pyrrolidinyl)methyl ester
aacagtgttcttgctctataa

SEQ ID NO: 144 - RNA, 21 nt, synthetic construct
  source 1..21: mol_type = other RNA
  modified_base 1: mod_base = OTHER; note = 2'-deoxy-2'-fluoroadenosine-3'-phosphorothioate
  modified_base 2: mod_base = OTHER; note = 2'-O-methyladenosine-3'-phosphorothioate
  modified_base 3: mod_base = OTHER; note = 2'-deoxy-2'-fluorocytidine-3'-phosphate
  modified_base 4: mod_base = OTHER; note = 2'-O-methyladenosine-3'-phosphate
  modified_base 5: mod_base = OTHER; note = 2'-deoxy-2'-fluoroguanosine-3'-phosphate
  modified_base 6: mod_base = OTHER; note = 2'-O-methyluridine-3'-phosphate
  modified_base 7: mod_base = OTHER; note = 2'-deoxy-2'-fluoroguanosine-3'-phosphate
  modified_base 8: mod_base = OTHER; note = 2'-O-methyluridine-3'-phosphate
  modified_base 9: mod_base = OTHER; note = 2'-deoxy-2'-fluorouridine-3'-phosphate
  modified_base 10: mod_base = OTHER; note = 4'-(S)-methyl-1-(alpha-L-threofuranosyl)cytosine 2'-phosphate
  modified_base 11: mod_base = OTHER; note = 2'-deoxy-2'-fluorouridine-3'-phosphate
  modified_base 12: mod_base = OTHER; note = 2'-O-methyluridine-3'-phosphate
  modified_base 13: mod_base = OTHER; note = 2'-deoxy-2'-fluoroguanosine-3'-phosphate
  modified_base 14: mod_base = OTHER; note = 2'-O-methylcytidine-3'-phosphate
  modified_base 15: mod_base = OTHER; note = 2'-deoxy-2'-fluorouridine-3'-phosphate
  modified_base 16: mod_base = OTHER; note = 2'-O-methylcytidine-3'-phosphate
  modified_base 17: mod_base = OTHER; note = 2'-deoxy-2'-fluorouridine-3'-phosphate
  modified_base 18: mod_base = OTHER; note = 2'-O-methyladenosine-3'-phosphate
  modified_base 19: mod_base = OTHER; note = 2'-deoxy-2'-fluorouridine-3'-phosphate
  modified_base 20: mod_base = OTHER; note = 2'-O-methyladenosine-3'-phosphate
  modified_base 21: mod_base = OTHER; note = 2'-deoxy-2'-fluoroadenosine-3'-phosphate ((2S,4R)-1-[29-[[2-(acetylamino)-2-deoxy-beta-D-galactopyra nosyl]oxy]-14,14-bis[[3-[[3-[[5-[[2-(acetylamino)-2-deoxy-b eta-D-galactopyranosyl]oxy]-1-oxopentyl]amino]propyl]amino] -3-oxopropoxy]methyl]-1,12,19,25-tetraoxo-16-oxa-13,20,24-t riazanonacos-1-yl]-4-hydroxy-2-pyrrolidinyl)methyl ester
aacagtgttcttgctctataa

SEQ ID NO: 145 - RNA, 21 nt, synthetic construct
  source 1..21: mol_type = other RNA
  modified_base 1: mod_base = OTHER; note = 2'-deoxy-2'-fluoroadenosine-3'-phosphorothioate
  modified_base 2: mod_base = OTHER; note = 2'-O-methyladenosine-3'-phosphorothioate
  modified_base 3: mod_base = OTHER; note = 2'-deoxy-2'-fluorocytidine-3'-phosphate
  modified_base 4: mod_base = OTHER; note = 2'-O-methyladenosine-3'-phosphate
  modified_base 5: mod_base = OTHER; note = 2'-deoxy-2'-fluoroguanosine-3'-phosphate
  modified_base 6: mod_base = OTHER; note = 2'-O-methyluridine-3'-phosphate
  modified_base 7: mod_base = OTHER; note = 2'-deoxy-2'-fluoroguanosine-3'-phosphate
  modified_base 8: mod_base = OTHER; note = 2'-O-methyluridine-3'-phosphate
  modified_base 9: mod_base = OTHER; note = 2'-deoxy-2'-fluorouridine-3'-phosphate
  modified_base 10: mod_base = OTHER; note = 2'-deoxy-2'-fluorocytidine-3'-phosphate
  modified_base 11: mod_base = OTHER; note = 4'-(S)-methyl-1-(alpha-L-threofuranosyl)thymine 2'-phosphate
  modified_base 12: mod_base = OTHER; note = 2'-O-methyluridine-3'-phosphate
  modified_base 13: mod_base = OTHER; note = 2'-deoxy-2'-fluoroguanosine-3'-phosphate
  modified_base 14: mod_base = OTHER; note = 2'-O-methylcytidine-3'-phosphate
  modified_base 15: mod_base = OTHER; note = 2'-deoxy-2'-fluorouridine-3'-phosphate
  modified_base 16: mod_base = OTHER; note = 2'-O-methylcytidine-3'-phosphate
  modified_base 17: mod_base = OTHER; note = 2'-deoxy-2'-fluorouridine-3'-phosphate
  modified_base 18: mod_base = OTHER; note = 2'-O-methyladenosine-3'-phosphate
  modified_base 19: mod_base = OTHER; note = 2'-deoxy-2'-fluorouridine-3'-phosphate
  modified_base 20: mod_base = OTHER; note = 2'-O-methyladenosine-3'-phosphate
  modified_base 21: mod_base = OTHER; note = 2'-deoxy-2'-fluoroadenosine-3'-phosphate ((2S,4R)-1-[29-[[2-(acetylamino)-2-deoxy-beta-D-galactopyra nosyl]oxy]-14,14-bis[[3-[[3-[[5-[[2-(acetylamino)-2-deoxy-b eta-D-galactopyranosyl]oxy]-1-oxopentyl]amino]propyl]amino] -3-oxopropoxy]methyl]-1,12,19,25-tetraoxo-16-oxa-13,20,24-t riazanonacos-1-yl]-4-hydroxy-2-pyrrolidinyl)methyl ester
aacagtgttcttgctctataa

SEQ ID NO: 146 - RNA, 21 nt, synthetic construct
  source 1..21: mol_type = other RNA
  modified_base 1: mod_base = OTHER; note = 2'-deoxy-2'-fluoroadenosine-3'-phosphorothioate
  modified_base 2: mod_base = OTHER; note = 2'-O-methyladenosine-3'-phosphorothioate
  modified_base 3: mod_base = OTHER; note = 2'-deoxy-2'-fluorocytidine-3'-phosphate
  modified_base 4: mod_base = OTHER; note = 2'-O-methyladenosine-3'-phosphate
  modified_base 5: mod_base = OTHER; note = 2'-deoxy-2'-fluoroguanosine-3'-phosphate
  modified_base 6: mod_base = OTHER; note = 2'-O-methyluridine-3'-phosphate
  modified_base 7: mod_base = OTHER; note = 2'-deoxy-2'-fluoroguanosine-3'-phosphate
  modified_base 8: mod_base = OTHER; note = 2'-O-methyluridine-3'-phosphate
  modified_base 9: mod_base = OTHER; note = 2'-deoxy-2'-fluorouridine-3'-phosphate
  modified_base 10: mod_base = OTHER; note = 2'-deoxy-2'-fluorocytidine-3'-phosphate
  modified_base 11: mod_base = OTHER; note = 2'-deoxy-2'-fluorouridine-3'-phosphate
  modified_base 12: mod_base = OTHER; note = 4'-(S)-methyl-1-(alpha-L-threofuranosyl)thymine 2'-phosphate
  modified_base 13: mod_base = OTHER; note = 2'-deoxy-2'-fluoroguanosine-3'-phosphate
  modified_base 14: mod_base = OTHER; note = 2'-O-methylcytidine-3'-phosphate
  modified_base 15: mod_base = OTHER; note = 2'-deoxy-2'-fluorouridine-3'-phosphate
  modified_base 16: mod_base = OTHER; note = 2'-O-methylcytidine-3'-phosphate
  modified_base 17: mod_base = OTHER; note = 2'-deoxy-2'-fluorouridine-3'-phosphate
  modified_base 18: mod_base = OTHER; note = 2'-O-methyladenosine-3'-phosphate
  modified_base 19: mod_base = OTHER; note = 2'-deoxy-2'-fluorouridine-3'-phosphate
  modified_base 20: mod_base = OTHER; note = 2'-O-methyladenosine-3'-phosphate
  modified_base 21: mod_base = OTHER; note = 2'-deoxy-2'-fluoroadenosine-3'-phosphate ((2S,4R)-1-[29-[[2-(acetylamino)-2-deoxy-beta-D-galactopyra nosyl]oxy]-14,14-bis[[3-[[3-[[5-[[2-(acetylamino)-2-deoxy-b eta-D-galactopyranosyl]oxy]-1-oxopentyl]amino]propyl]amino] -3-oxopropoxy]methyl]-1,12,19,25-tetraoxo-16-oxa-13,20,24-t riazanonacos-1-yl]-4-hydroxy-2-pyrrolidinyl)methyl ester
aacagtgttcttgctctataa

SEQ ID NO: 147 - RNA, 21 nt, synthetic construct
  source 1..21: mol_type = other RNA
  modified_base 1: mod_base = OTHER; note = 2'-deoxy-2'-fluoroadenosine-3'-phosphorothioate
  modified_base 2: mod_base = OTHER; note = 2'-O-methyladenosine-3'-phosphorothioate
  modified_base 3: mod_base = OTHER; note = 2'-deoxy-2'-fluorocytidine-3'-phosphate
  modified_base 4: mod_base = OTHER; note = 2'-O-methyladenosine-3'-phosphate
  modified_base 5: mod_base = OTHER; note = 2'-deoxy-2'-fluoroguanosine-3'-phosphate
  modified_base 6: mod_base = OTHER; note = 2'-O-methyluridine-3'-phosphate
  modified_base 7: mod_base = OTHER; note = 2'-deoxy-2'-fluoroguanosine-3'-phosphate
  modified_base 8: mod_base = OTHER; note = 2'-O-methyluridine-3'-phosphate
  modified_base 9: mod_base = OTHER; note = 2'-deoxy-2'-fluorouridine-3'-phosphate
  modified_base 10: mod_base = OTHER; note = 2'-deoxy-2'-fluorocytidine-3'-phosphate
  modified_base 11: mod_base = OTHER; note = 2'-deoxy-2'-fluorouridine-3'-phosphate
  modified_base 12: mod_base = OTHER; note = 2'-O-methyluridine-3'-phosphate
  modified_base 13: mod_base = OTHER; note = 4'-(S)-methyl-9-(alpha-L-threofuranosyl)guanine 2'-phosphate
  modified_base 14: mod_base = OTHER; note = 2'-O-methylcytidine-3'-phosphate
  modified_base 15: mod_base = OTHER; note = 2'-deoxy-2'-fluorouridine-3'-phosphate
  modified_base 16: mod_base = OTHER; note = 2'-O-methylcytidine-3'-phosphate
  modified_base 17: mod_base = OTHER; note = 2'-deoxy-2'-fluorouridine-3'-phosphate
  modified_base 18: mod_base = OTHER; note = 2'-O-methyladenosine-3'-phosphate
  modified_base 19: mod_base = OTHER; note = 2'-deoxy-2'-fluorouridine-3'-phosphate
  modified_base 20: mod_base = OTHER; note = 2'-O-methyladenosine-3'-phosphate
  modified_base 21: mod_base = OTHER; note = 2'-deoxy-2'-fluoroadenosine-3'-phosphate ((2S,4R)-1-[29-[[2-(acetylamino)-2-deoxy-beta-D-galactopyra nosyl]oxy]-14,14-bis[[3-[[3-[[5-[[2-(acetylamino)-2-deoxy-b eta-D-galactopyranosyl]oxy]-1-oxopentyl]amino]propyl]amino] -3-oxopropoxy]methyl]-1,12,19,25-tetraoxo-16-oxa-13,20,24-t riazanonacos-1-yl]-4-hydroxy-2-pyrrolidinyl)methyl ester
aacagtgttcttgctctataa

SEQ ID NO: 148 - RNA, 21 nt, synthetic construct
  source 1..21: mol_type = other RNA
  modified_base 1: mod_base = OTHER; note = 2'-deoxy-2'-fluoroadenosine-3'-phosphorothioate
  modified_base 2: mod_base = OTHER; note = 2'-O-methyladenosine-3'-phosphorothioate
  modified_base 3: mod_base = OTHER; note = 2'-deoxy-2'-fluorocytidine-3'-phosphate
  modified_base 4: mod_base = OTHER; note = 2'-O-methyladenosine-3'-phosphate
  modified_base 5: mod_base = OTHER; note = 2'-deoxy-2'-fluoroguanosine-3'-phosphate
  modified_base 6: mod_base = OTHER; note = 2'-O-methyluridine-3'-phosphate
  modified_base 7: mod_base = OTHER; note = 2'-deoxy-2'-fluoroguanosine-3'-phosphate
  modified_base 8: mod_base = OTHER; note = 2'-O-methyluridine-3'-phosphate
  modified_base 9: mod_base = OTHER; note = 2'-deoxy-2'-fluorouridine-3'-phosphate
  modified_base 10: mod_base = OTHER; note = 2'-deoxy-2'-fluorocytidine-3'-phosphate
  modified_base 11: mod_base = OTHER; note = 2'-deoxy-2'-fluorouridine-3'-phosphate
  modified_base 12: mod_base = OTHER; note = 2'-O-methyluridine-3'-phosphate
  modified_base 13: mod_base = OTHER; note = 2'-deoxy-2'-fluoroguanosine-3'-phosphate
  modified_base 14: mod_base = OTHER; note = 4'-(S)-methyl-1-(alpha-L-threofuranosyl)cytosine 2'-phosphate
  modified_base 15: mod_base = OTHER; note = 2'-deoxy-2'-fluorouridine-3'-phosphate
  modified_base 16: mod_base = OTHER; note = 2'-O-methylcytidine-3'-phosphate
  modified_base 17: mod_base = OTHER; note = 2'-deoxy-2'-fluorouridine-3'-phosphate
  modified_base 18: mod_base = OTHER; note = 2'-O-methyladenosine-3'-phosphate
  modified_base 19: mod_base = OTHER; note = 2'-deoxy-2'-fluorouridine-3'-phosphate
  modified_base 20: mod_base = OTHER; note = 2'-O-methyladenosine-3'-phosphate
  modified_base 21: mod_base = OTHER; note = 2'-deoxy-2'-fluoroadenosine-3'-phosphate ((2S,4R)-1-[29-[[2-(acetylamino)-2-deoxy-beta-D-galactopyra nosyl]oxy]-14,14-bis[[3-[[3-[[5-[[2-(acetylamino)-2-deoxy-b eta-D-galactopyranosyl]oxy]-1-oxopentyl]amino]propyl]amino] -3-oxopropoxy]methyl]-1,12,19,25-tetraoxo-16-oxa-13,20,24-t riazanonacos-1-yl]-4-hydroxy-2-pyrrolidinyl)methyl ester
aacagtgttcttgctctataa

SEQ ID NO: 149 - RNA, 21 nt, synthetic construct
  source 1..21: mol_type = other RNA
  modified_base 1: mod_base = OTHER; note = 2'-deoxy-2'-fluoroadenosine-3'-phosphorothioate
  modified_base 2: mod_base = OTHER; note = 2'-O-methyladenosine-3'-phosphorothioate
  modified_base 3: mod_base = OTHER; note = 2'-deoxy-2'-fluorocytidine-3'-phosphate
  modified_base 4: mod_base = OTHER; note = 2'-O-methyladenosine-3'-phosphate
  modified_base 5: mod_base = OTHER; note = 2'-deoxy-2'-fluoroguanosine-3'-phosphate
  modified_base 6: mod_base = OTHER; note = 2'-O-methyluridine-3'-phosphate
  modified_base 7: mod_base = OTHER; note = 2'-deoxy-2'-fluoroguanosine-3'-phosphate
  modified_base 8: mod_base = OTHER; note = 2'-O-methyluridine-3'-phosphate
  modified_base 9: mod_base = OTHER; note = 2'-deoxy-2'-fluorouridine-3'-phosphate
  modified_base 10: mod_base = OTHER; note = 2'-deoxy-2'-fluorocytidine-3'-phosphate
  modified_base 11: mod_base = OTHER; note = 2'-deoxy-2'-fluorouridine-3'-phosphate
  modified_base 12: mod_base = OTHER; note = 2'-O-methyluridine-3'-phosphate
  modified_base 13: mod_base = OTHER; note = 2'-deoxy-2'-fluoroguanosine-3'-phosphate
  modified_base 14: mod_base = OTHER; note = 2'-O-methylcytidine-3'-phosphate
  modified_base 15: mod_base = OTHER; note = 4'-(S)-methyl-1-(alpha-L-threofuranosyl)thymine 2'-phosphate
  modified_base 16: mod_base = OTHER; note = 2'-O-methylcytidine-3'-phosphate
  modified_base 17: mod_base = OTHER; note = 2'-deoxy-2'-fluorouridine-3'-phosphate
  modified_base 18: mod_base = OTHER; note = 2'-O-methyladenosine-3'-phosphate
  modified_base 19: mod_base = OTHER; note = 2'-deoxy-2'-fluorouridine-3'-phosphate
  modified_base 20: mod_base = OTHER; note = 2'-O-methyladenosine-3'-phosphate
  modified_base 21: mod_base = OTHER; note = 2'-deoxy-2'-fluoroadenosine-3'-phosphate ((2S,4R)-1-[29-[[2-(acetylamino)-2-deoxy-beta-D-galactopyra nosyl]oxy]-14,14-bis[[3-[[3-[[5-[[2-(acetylamino)-2-deoxy-b eta-D-galactopyranosyl]oxy]-1-oxopentyl]amino]propyl]amino] -3-oxopropoxy]methyl]-1,12,19,25-tetraoxo-16-oxa-13,20,24-t riazanonacos-1-yl]-4-hydroxy-2-pyrrolidinyl)methyl ester
aacagtgttcttgctctataa

SEQ ID NO: 150 - RNA, 21 nt, synthetic construct
  source 1..21: mol_type = other RNA
  modified_base 1: mod_base = OTHER; note = 2'-deoxy-2'-fluoroadenosine-3'-phosphorothioate
  modified_base 2: mod_base = OTHER; note = 2'-O-methyladenosine-3'-phosphorothioate
  modified_base 3: mod_base = OTHER; note = 2'-deoxy-2'-fluorocytidine-3'-phosphate
  modified_base 4: mod_base = OTHER; note = 2'-O-methyladenosine-3'-phosphate
  modified_base 5: mod_base = OTHER; note = 2'-deoxy-2'-fluoroguanosine-3'-phosphate
  modified_base 6: mod_base = OTHER; note = 2'-O-methyluridine-3'-phosphate
  modified_base 7: mod_base = OTHER; note = 2'-deoxy-2'-fluoroguanosine-3'-phosphate
  modified_base 8: mod_base = OTHER; note = 2'-O-methyluridine-3'-phosphate
  modified_base 9: mod_base = OTHER; note = 2'-deoxy-2'-fluorouridine-3'-phosphate
  modified_base 10: mod_base = OTHER; note = 2'-deoxy-2'-fluorocytidine-3'-phosphate
  modified_base 11: mod_base = OTHER; note = 2'-deoxy-2'-fluorouridine-3'-phosphate
  modified_base 12: mod_base = OTHER; note = 2'-O-methyluridine-3'-phosphate
  modified_base 13: mod_base = OTHER; note = 2'-deoxy-2'-fluoroguanosine-3'-phosphate
  modified_base 14: mod_base = OTHER; note = 2'-O-methylcytidine-3'-phosphate
  modified_base 15: mod_base = OTHER; note = 2'-deoxy-2'-fluorouridine-3'-phosphate
  modified_base 16: mod_base = OTHER; note = 4'-(S)-methyl-1-(alpha-L-threofuranosyl)cytosine 2'-phosphate
  modified_base 17: mod_base = OTHER; note = 2'-deoxy-2'-fluorouridine-3'-phosphate
  modified_base 18: mod_base = OTHER; note = 2'-O-methyladenosine-3'-phosphate
  modified_base 19: mod_base = OTHER; note = 2'-deoxy-2'-fluorouridine-3'-phosphate
  modified_base 20: mod_base = OTHER; note = 2'-O-methyladenosine-3'-phosphate
  modified_base 21: mod_base = OTHER; note = 2'-deoxy-2'-fluoroadenosine-3'-phosphate ((2S,4R)-1-[29-[[2-(acetylamino)-2-deoxy-beta-D-galactopyra nosyl]oxy]-14,14-bis[[3-[[3-[[5-[[2-(acetylamino)-2-deoxy-b eta-D-galactopyranosyl]oxy]-1-oxopentyl]amino]propyl]amino] -3-oxopropoxy]methyl]-1,12,19,25-tetraoxo-16-oxa-13,20,24-t riazanonacos-1-yl]-4-hydroxy-2-pyrrolidinyl)methyl ester
aacagtgttcttgctctataa

SEQ ID NO: 151 - RNA, 21 nt, synthetic construct
  source 1..21: mol_type = other RNA
  modified_base 1: mod_base = OTHER; note = 2'-deoxy-2'-fluoroadenosine-3'-phosphorothioate
  modified_base 2: mod_base = OTHER; note = 2'-O-methyladenosine-3'-phosphorothioate
  modified_base 3: mod_base = OTHER; note = 2'-deoxy-2'-fluorocytidine-3'-phosphate
  modified_base 4: mod_base = OTHER; note = 2'-O-methyladenosine-3'-phosphate
  modified_base 5: mod_base = OTHER; note = 2'-deoxy-2'-fluoroguanosine-3'-phosphate
  modified_base 6: mod_base = OTHER; note = 2'-O-methyluridine-3'-phosphate
  modified_base 7: mod_base = OTHER; note = 2'-deoxy-2'-fluoroguanosine-3'-phosphate
  modified_base 8: mod_base = OTHER; note = 2'-O-methyluridine-3'-phosphate
  modified_base 9: mod_base = OTHER; note = 2'-deoxy-2'-fluorouridine-3'-phosphate
  modified_base 10: mod_base = OTHER; note = 2'-deoxy-2'-fluorocytidine-3'-phosphate
  modified_base 11: mod_base = OTHER; note = 2'-deoxy-2'-fluorouridine-3'-phosphate
  modified_base 12: mod_base = OTHER; note = 2'-O-methyluridine-3'-phosphate
  modified_base 13: mod_base = OTHER; note = 2'-deoxy-2'-fluoroguanosine-3'-phosphate
  modified_base 14: mod_base = OTHER; note = 2'-O-methylcytidine-3'-phosphate
  modified_base 15: mod_base = OTHER; note = 2'-deoxy-2'-fluorouridine-3'-phosphate
  modified_base 16: mod_base = OTHER; note = 2'-O-methylcytidine-3'-phosphate
  modified_base 17: mod_base = OTHER; note = 4'-(S)-methyl-1-(alpha-L-threofuranosyl)thymine 2'-phosphate
  modified_base 18: mod_base = OTHER; note = 2'-O-methyladenosine-3'-phosphate
  modified_base 19: mod_base = OTHER; note = 2'-deoxy-2'-fluorouridine-3'-phosphate
  modified_base 20: mod_base = OTHER; note = 2'-O-methyladenosine-3'-phosphate
  modified_base 21: mod_base = OTHER; note = 2'-deoxy-2'-fluoroadenosine-3'-phosphate ((2S,4R)-1-[29-[[2-(acetylamino)-2-deoxy-beta-D-galactopyra nosyl]oxy]-14,14-bis[[3-[[3-[[5-[[2-(acetylamino)-2-deoxy-b eta-D-galactopyranosyl]oxy]-1-oxopentyl]amino]propyl]amino] -3-oxopropoxy]methyl]-1,12,19,25-tetraoxo-16-oxa-13,20,24-t riazanonacos-1-yl]-4-hydroxy-2-pyrrolidinyl)methyl ester
aacagtgttcttgctctataa

SEQ ID NO: 152 - RNA, 21 nt, synthetic construct
  source 1..21: mol_type = other RNA
  modified_base 1: mod_base = OTHER; note = 2'-deoxy-2'-fluoroadenosine-3'-phosphorothioate
  modified_base 2: mod_base = OTHER; note = 2'-O-methyladenosine-3'-phosphorothioate
  modified_base 3: mod_base = OTHER; note = 2'-deoxy-2'-fluorocytidine-3'-phosphate
  modified_base 4: mod_base = OTHER; note = 2'-O-methyladenosine-3'-phosphate
  modified_base 5: mod_base = OTHER; note = 2'-deoxy-2'-fluoroguanosine-3'-phosphate
  modified_base 6: mod_base = OTHER; note = 2'-O-methyluridine-3'-phosphate
  modified_base 7: mod_base = OTHER; note = 2'-deoxy-2'-fluoroguanosine-3'-phosphate
  modified_base 8: mod_base = OTHER; note = 2'-O-methyluridine-3'-phosphate
  modified_base 9: mod_base = OTHER; note = 2'-deoxy-2'-fluorouridine-3'-phosphate
  modified_base 10: mod_base = OTHER; note = 2'-deoxy-2'-fluorocytidine-3'-phosphate
  modified_base 11: mod_base = OTHER; note = 2'-deoxy-2'-fluorouridine-3'-phosphate
  modified_base 12: mod_base = OTHER; note = 2'-O-methyluridine-3'-phosphate
  modified_base 13: mod_base = OTHER; note = 2'-deoxy-2'-fluoroguanosine-3'-phosphate
  modified_base 14: mod_base = OTHER; note = 2'-O-methylcytidine-3'-phosphate
  modified_base 15: mod_base = OTHER; note = 2'-deoxy-2'-fluorouridine-3'-phosphate
  modified_base 16: mod_base = OTHER; note = 2'-O-methylcytidine-3'-phosphate
  modified_base 17: mod_base = OTHER; note = 2'-deoxy-2'-fluorouridine-3'-phosphate
  modified_base 18: mod_base = OTHER; note = 4'-(S)-methyl-9-(alpha-L-threofuranosyl)adenine 2'-phosphate
  modified_base 19: mod_base = OTHER; note = 2'-deoxy-2'-fluorouridine-3'-phosphate
  modified_base 20: mod_base = OTHER; note = 2'-O-methyladenosine-3'-phosphate
  modified_base 21: mod_base = OTHER; note = 2'-deoxy-2'-fluoroadenosine-3'-phosphate ((2S,4R)-1-[29-[[2-(acetylamino)-2-deoxy-beta-D-galactopyra nosyl]oxy]-14,14-bis[[3-[[3-[[5-[[2-(acetylamino)-2-deoxy-b eta-D-galactopyranosyl]oxy]-1-oxopentyl]amino]propyl]amino] -3-oxopropoxy]methyl]-1,12,19,25-tetraoxo-16-oxa-13,20,24-t riazanonacos-1-yl]-4-hydroxy-2-pyrrolidinyl)methyl ester
aacagtgttcttgctctataa

SEQ ID NO: 153 - RNA, 21 nt, synthetic construct
  source 1..21: mol_type = other RNA
  modified_base 1: mod_base = OTHER; note = 2'-deoxy-2'-fluoroadenosine-3'-phosphorothioate
  modified_base 2: mod_base = OTHER; note = 2'-O-methyladenosine-3'-phosphorothioate
  modified_base 3: mod_base = OTHER; note = 2'-deoxy-2'-fluorocytidine-3'-phosphate
  modified_base 4: mod_base = OTHER; note = 2'-O-methyladenosine-3'-phosphate
  modified_base 5: mod_base = OTHER; note = 2'-deoxy-2'-fluoroguanosine-3'-phosphate
  modified_base 6: mod_base = OTHER; note = 2'-O-methyluridine-3'-phosphate
  modified_base 7: mod_base = OTHER; note = 2'-deoxy-2'-fluoroguanosine-3'-phosphate
  modified_base 8: mod_base = OTHER; note = 2'-O-methyluridine-3'-phosphate
  modified_base 9: mod_base = OTHER; note = 2'-deoxy-2'-fluorouridine-3'-phosphate
  modified_base 10: mod_base = OTHER; note = 2'-deoxy-2'-fluorocytidine-3'-phosphate
  modified_base 11: mod_base = OTHER; note = 2'-deoxy-2'-fluorouridine-3'-phosphate
  modified_base 12: mod_base = OTHER; note = 2'-O-methyluridine-3'-phosphate
  modified_base 13: mod_base = OTHER; note = 2'-deoxy-2'-fluoroguanosine-3'-phosphate
  modified_base 14: mod_base = OTHER; note = 2'-O-methylcytidine-3'-phosphate
  modified_base 15: mod_base = OTHER; note = 2'-deoxy-2'-fluorouridine-3'-phosphate
  modified_base 16: mod_base = OTHER; note = 2'-O-methylcytidine-3'-phosphate
  modified_base 17: mod_base = OTHER; note = 2'-deoxy-2'-fluorouridine-3'-phosphate
  modified_base 18: mod_base = OTHER; note = 2'-O-methyladenosine-3'-phosphate
  modified_base 19: mod_base = OTHER; note = 4'-(S)-methyl-1-(alpha-L-threofuranosyl)thymine 2'-phosphate
  modified_base 20: mod_base = OTHER; note = 2'-O-methyladenosine-3'-phosphate
  modified_base 21: mod_base = OTHER; note = 2'-deoxy-2'-fluoroadenosine-3'-phosphate ((2S,4R)-1-[29-[[2-(acetylamino)-2-deoxy-beta-D-galactopyra nosyl]oxy]-14,14-bis[[3-[[3-[[5-[[2-(acetylamino)-2-deoxy-b eta-D-galactopyranosyl]oxy]-1-oxopentyl]amino]propyl]amino] -3-oxopropoxy]methyl]-1,12,19,25-tetraoxo-16-oxa-13,20,24-t riazanonacos-1-yl]-4-hydroxy-2-pyrrolidinyl)methyl ester
aacagtgttcttgctctataa

SEQ ID NO: 154 - RNA, 21 nt, synthetic construct
  source 1..21: mol_type = other RNA
  modified_base 1: mod_base = OTHER; note = 2'-deoxy-2'-fluoroadenosine-3'-phosphorothioate
  modified_base 2: mod_base = OTHER; note = 2'-O-methyladenosine-3'-phosphorothioate
  modified_base 3: mod_base = OTHER; note = 2'-deoxy-2'-fluorocytidine-3'-phosphate
  modified_base 4: mod_base = OTHER; note = 2'-O-methyladenosine-3'-phosphate
  modified_base 5: mod_base = OTHER; note = 2'-deoxy-2'-fluoroguanosine-3'-phosphate
  modified_base 6: mod_base = OTHER; note = 2'-O-methyluridine-3'-phosphate
  modified_base 7: mod_base = OTHER; note = 2'-deoxy-2'-fluoroguanosine-3'-phosphate
  modified_base 8: mod_base = OTHER; note = 2'-O-methyluridine-3'-phosphate
  modified_base 9: mod_base = OTHER; note = 2'-deoxy-2'-fluorouridine-3'-phosphate
  modified_base 10: mod_base = OTHER; note = 2'-deoxy-2'-fluorocytidine-3'-phosphate
  modified_base 11: mod_base = OTHER; note = 2'-deoxy-2'-fluorouridine-3'-phosphate
  modified_base 12: mod_base = OTHER; note = 2'-O-methyluridine-3'-phosphate
  modified_base 13: mod_base = OTHER; note = 2'-deoxy-2'-fluoroguanosine-3'-phosphate
  modified_base 14: mod_base = OTHER; note = 2'-O-methylcytidine-3'-phosphate
  modified_base 15: mod_base = OTHER; note = 2'-deoxy-2'-fluorouridine-3'-phosphate
  modified_base 16: mod_base = OTHER; note = 2'-O-methylcytidine-3'-phosphate
  modified_base 17: mod_base = OTHER; note = 2'-deoxy-2'-fluorouridine-3'-phosphate
  modified_base 18: mod_base = OTHER; note = 2'-O-methyladenosine-3'-phosphate
  modified_base 19: mod_base = OTHER; note = 2'-deoxy-2'-fluorouridine-3'-phosphate
  modified_base 20: mod_base = OTHER; note = 4'-(S)-methyl-9-(alpha-L-threofuranosyl)adenine 2'-phosphate
  modified_base 21: mod_base = OTHER; note = 2'-deoxy-2'-fluoroadenosine-3'-phosphate ((2S,4R)-1-[29-[[2-(acetylamino)-2-deoxy-beta-D-galactopyra nosyl]oxy]-14,14-bis[[3-[[3-[[5-[[2-(acetylamino)-2-deoxy-b eta-D-galactopyranosyl]oxy]-1-oxopentyl]amino]propyl]amino] -3-oxopropoxy]methyl]-1,12,19,25-tetraoxo-16-oxa-13,20,24-t riazanonacos-1-yl]-4-hydroxy-2-pyrrolidinyl)methyl ester
aacagtgttcttgctctataa

SEQ ID NO: 155 - RNA, 21 nt, synthetic construct
  source 1..21: mol_type = other RNA
  modified_base 1: mod_base = OTHER; note = 2'-deoxy-2'-fluoroadenosine-3'-phosphorothioate
  modified_base 2: mod_base = OTHER; note = 2'-O-methyladenosine-3'-phosphorothioate
  modified_base 3: mod_base = OTHER; note = 2'-deoxy-2'-fluorocytidine-3'-phosphate
  modified_base 4: mod_base = OTHER; note = 2'-O-methyladenosine-3'-phosphate
  modified_base 5: mod_base = OTHER; note = 2'-deoxy-2'-fluoroguanosine-3'-phosphate
  modified_base 6: mod_base = OTHER; note = 2'-O-methyluridine-3'-phosphate
  modified_base 7: mod_base = OTHER; note = 2'-deoxy-2'-fluoroguanosine-3'-phosphate
  modified_base 8: mod_base = OTHER; note = 2'-O-methyluridine-3'-phosphate
  modified_base 9: mod_base = OTHER; note = 2'-deoxy-2'-fluorouridine-3'-phosphate
  modified_base 10: mod_base = OTHER; note = 2'-deoxy-2'-fluorocytidine-3'-phosphate
  modified_base 11: mod_base = OTHER; note = 2'-deoxy-2'-fluorouridine-3'-phosphate
  modified_base 12: mod_base = OTHER; note = 2'-O-methyluridine-3'-phosphate
  modified_base 13: mod_base = OTHER; note = 2'-deoxy-2'-fluoroguanosine-3'-phosphate
  modified_base 14: mod_base = OTHER; note = 2'-O-methylcytidine-3'-phosphate
  modified_base 15: mod_base = OTHER; note = 2'-deoxy-2'-fluorouridine-3'-phosphate
  modified_base 16: mod_base = OTHER; note = 2'-O-methylcytidine-3'-phosphate
  modified_base 17: mod_base = OTHER; note = 2'-deoxy-2'-fluorouridine-3'-phosphate
  modified_base 18: mod_base = OTHER; note = 2'-O-methyladenosine-3'-phosphate
  modified_base 19: mod_base = OTHER; note = 2'-deoxy-2'-fluorouridine-3'-phosphate
  modified_base 20: mod_base = OTHER; note = 2'-O-methyladenosine-3'-phosphate
  modified_base 21: mod_base = OTHER; note = 4'-(S)-methyl-9-(alpha-L-threofuranosyl)adenine 2'-phosphate ((2S,4R)-1-[29-[[2-(acetylamino)-2-deoxy-beta-D-galactopyra nosyl]oxy]-14,14-bis[[3-[[3-[[5-[[2-(acetylamino)-2-deoxy-b eta-D-galactopyranosyl]oxy]-1-oxopentyl]amino]propyl]amino] -3-oxopropoxy]methyl]-1,12,19,25-tetraoxo-16-oxa-13,20,24-t riazanonacos-1-yl]-4-hydroxy-2-pyrrolidinyl)methyl ester
aacagtgttcttgctctataa

SEQ ID NO: 156 - RNA, 21 nt, synthetic construct
  source 1..21: mol_type = other RNA
  modified_base 1: mod_base = OTHER; note = 4'-(R)-methyl-9-(alpha-L-threofuranosyl)adenine 2'-phosphorothioate
  modified_base 2: mod_base = OTHER; note = 2'-O-methyladenosine-3'-phosphorothioate
  modified_base 3: mod_base = OTHER; note = 2'-deoxy-2'-fluorocytidine-3'-phosphate
  modified_base 4: mod_base = OTHER; note = 2'-O-methyladenosine-3'-phosphate
  modified_base 5: mod_base = OTHER; note = 2'-deoxy-2'-fluoroguanosine-3'-phosphate
  modified_base 6: mod_base = OTHER; note = 2'-O-methyluridine-3'-phosphate
  modified_base 7: mod_base = OTHER; note = 2'-deoxy-2'-fluoroguanosine-3'-phosphate
  modified_base 8: mod_base = OTHER; note = 2'-O-methyluridine-3'-phosphate
  modified_base 9: mod_base = OTHER; note = 2'-deoxy-2'-fluorouridine-3'-phosphate
  modified_base 10: mod_base = OTHER; note = 2'-deoxy-2'-fluorocytidine-3'-phosphate
  modified_base 11: mod_base = OTHER; note = 2'-deoxy-2'-fluorouridine-3'-phosphate
  modified_base 12: mod_base = OTHER; note = 2'-O-methyluridine-3'-phosphate
  modified_base 13: mod_base = OTHER; note = 2'-deoxy-2'-fluoroguanosine-3'-phosphate
  modified_base 14: mod_base = OTHER; note = 2'-O-methylcytidine-3'-phosphate
  modified_base 15: mod_base = OTHER; note = 2'-deoxy-2'-fluorouridine-3'-phosphate
  modified_base 16: mod_base = OTHER; note = 2'-O-methylcytidine-3'-phosphate
  modified_base 17: mod_base = OTHER; note = 2'-deoxy-2'-fluorouridine-3'-phosphate
  modified_base 18: mod_base = OTHER; note = 2'-O-methyladenosine-3'-phosphate
  modified_base 19: mod_base = OTHER; note = 2'-deoxy-2'-fluorouridine-3'-phosphate
  modified_base 20: mod_base = OTHER; note = 2'-O-methyladenosine-3'-phosphate
  modified_base 21: mod_base = OTHER; note = 2'-deoxy-2'-fluoroadenosine-3'-phosphate ((2S,4R)-1-[29-[[2-(acetylamino)-2-deoxy-beta-D-galactopyra nosyl]oxy]-14,14-bis[[3-[[3-[[5-[[2-(acetylamino)-2-deoxy-b eta-D-galactopyranosyl]oxy]-1-oxopentyl]amino]propyl]amino] -3-oxopropoxy]methyl]-1,12,19,25-tetraoxo-16-oxa-13,20,24-t riazanonacos-1-yl]-4-hydroxy-2-pyrrolidinyl)methyl ester
aacagtgttcttgctctataa

SEQ ID NO: 157 - RNA, 21 nt, synthetic construct
  source 1..21: mol_type = other RNA
  modified_base 1: mod_base = OTHER; note = 2'-deoxy-2'-fluoroadenosine-3'-phosphorothioate
  modified_base 2: mod_base = OTHER; note = 4'-(R)-methyl-9-(alpha-L-threofuranosyl)adenine 2'-phosphorothioate
  modified_base 3: mod_base = OTHER; note = 2'-deoxy-2'-fluorocytidine-3'-phosphate
  modified_base 4: mod_base = OTHER; note = 2'-O-methyladenosine-3'-phosphate
  modified_base 5: mod_base = OTHER; note = 2'-deoxy-2'-fluoroguanosine-3'-phosphate
  modified_base 6: mod_base = OTHER; note = 2'-O-methyluridine-3'-phosphate
  modified_base 7: mod_base = OTHER; note = 2'-deoxy-2'-fluoroguanosine-3'-phosphate
  modified_base 8: mod_base = OTHER; note = 2'-O-methyluridine-3'-phosphate
  modified_base 9: mod_base = OTHER; note = 2'-deoxy-2'-fluorouridine-3'-phosphate
  modified_base 10: mod_base = OTHER; note = 2'-deoxy-2'-fluorocytidine-3'-phosphate
  modified_base 11: mod_base = OTHER; note = 2'-deoxy-2'-fluorouridine-3'-phosphate
  modified_base 12: mod_base = OTHER; note = 2'-O-methyluridine-3'-phosphate
  modified_base 13: mod_base = OTHER; note = 2'-deoxy-2'-fluoroguanosine-3'-phosphate
  modified_base 14: mod_base = OTHER; note = 2'-O-methylcytidine-3'-phosphate
  modified_base 15: mod_base = OTHER; note = 2'-deoxy-2'-fluorouridine-3'-phosphate
  modified_base 16: mod_base = OTHER; note = 2'-O-methylcytidine-3'-phosphate
  modified_base 17: mod_base = OTHER; note = 2'-deoxy-2'-fluorouridine-3'-phosphate
  modified_base 18: mod_base = OTHER; note = 2'-O-methyladenosine-3'-phosphate
  modified_base 19: mod_base = OTHER; note = 2'-deoxy-2'-fluorouridine-3'-phosphate
  modified_base 20: mod_base = OTHER; note = 2'-O-methyladenosine-3'-phosphate
  modified_base 21: mod_base = OTHER; note = 2'-deoxy-2'-fluoroadenosine-3'-phosphate ((2S,4R)-1-[29-[[2-(acetylamino)-2-deoxy-beta-D-galactopyra nosyl]oxy]-14,14-bis[[3-[[3-[[5-[[2-(acetylamino)-2-deoxy-b eta-D-galactopyranosyl]oxy]-1-oxopentyl]amino]propyl]amino] -3-oxopropoxy]methyl]-1,12,19,25-tetraoxo-16-oxa-13,20,24-t riazanonacos-1-yl]-4-hydroxy-2-pyrrolidinyl)methyl ester
aacagtgttcttgctctataa

SEQ ID NO: 158 - RNA, 21 nt, synthetic construct
  source 1..21: mol_type = other RNA
  modified_base 1: mod_base = OTHER; note = 2'-deoxy-2'-fluoroadenosine-3'-phosphorothioate
  modified_base 2: mod_base = OTHER; note = 2'-O-methyladenosine-3'-phosphorothioate
  modified_base 3: mod_base = OTHER; note = 4'-(R)-methyl-1-(alpha-L-threofuranosyl)cytosine 2'-phosphate
  modified_base 4: mod_base = OTHER; note = 2'-O-methyladenosine-3'-phosphate
  modified_base 5: mod_base = OTHER; note = 2'-deoxy-2'-fluoroguanosine-3'-phosphate
  modified_base 6: mod_base = OTHER; note = 2'-O-methyluridine-3'-phosphate
  modified_base 7: mod_base = OTHER; note = 2'-deoxy-2'-fluoroguanosine-3'-phosphate
  modified_base 8: mod_base = OTHER; note = 2'-O-methyluridine-3'-phosphate
  modified_base 9: mod_base = OTHER; note = 2'-deoxy-2'-fluorouridine-3'-phosphate
  modified_base 10: mod_base = OTHER; note = 2'-deoxy-2'-fluorocytidine-3'-phosphate
  modified_base 11: mod_base = OTHER; note = 2'-deoxy-2'-fluorouridine-3'-phosphate
  modified_base 12: mod_base = OTHER; note = 2'-O-methyluridine-3'-phosphate
  modified_base 13: mod_base = OTHER; note = 2'-deoxy-2'-fluoroguanosine-3'-phosphate
  modified_base 14: mod_base = OTHER; note = 2'-O-methylcytidine-3'-phosphate
  modified_base 15: mod_base = OTHER; note = 2'-deoxy-2'-fluorouridine-3'-phosphate
  modified_base 16: mod_base = OTHER; note = 2'-O-methylcytidine-3'-phosphate
  modified_base 17: mod_base = OTHER; note = 2'-deoxy-2'-fluorouridine-3'-phosphate
  modified_base 18: mod_base = OTHER; note = 2'-O-methyladenosine-3'-phosphate
  modified_base 19: mod_base = OTHER; note = 2'-deoxy-2'-fluorouridine-3'-phosphate
  modified_base 20: mod_base = OTHER; note = 2'-O-methyladenosine-3'-phosphate
  modified_base 21: mod_base = OTHER; note = 2'-deoxy-2'-fluoroadenosine-3'-phosphate ((2S,4R)-1-[29-[[2-(acetylamino)-2-deoxy-beta-D-galactopyra nosyl]oxy]-14,14-bis[[3-[[3-[[5-[[2-(acetylamino)-2-deoxy-b eta-D-galactopyranosyl]oxy]-1-oxopentyl]amino]propyl]amino] -3-oxopropoxy]methyl]-1,12,19,25-tetraoxo-16-oxa-13,20,24-t riazanonacos-1-yl]-4-hydroxy-2-pyrrolidinyl)methyl ester
aacagtgttcttgctctataa

SEQ ID NO: 159 - RNA, 21 nt, synthetic construct
  source 1..21: mol_type = other RNA
  modified_base 1: mod_base = OTHER; note = 2'-deoxy-2'-fluoroadenosine-3'-phosphorothioate
  modified_base 2: mod_base = OTHER; note = 2'-O-methyladenosine-3'-phosphorothioate
  modified_base 3: mod_base = OTHER; note = 2'-deoxy-2'-fluorocytidine-3'-phosphate
  modified_base 4: mod_base = OTHER; note = 4'-(R)-methyl-9-(alpha-L-threofuranosyl)adenine 2'-phosphate
  modified_base 5: mod_base = OTHER; note = 2'-deoxy-2'-fluoroguanosine-3'-phosphate
  modified_base 6: mod_base = OTHER; note = 2'-O-methyluridine-3'-phosphate
  modified_base 7: mod_base = OTHER; note = 2'-deoxy-2'-fluoroguanosine-3'-phosphate
  modified_base 8: mod_base = OTHER; note = 2'-O-methyluridine-3'-phosphate
  modified_base 9: mod_base = OTHER; note = 2'-deoxy-2'-fluorouridine-3'-phosphate
  modified_base 10: mod_base = OTHER; note = 2'-deoxy-2'-fluorocytidine-3'-phosphate
  modified_base 11: mod_base = OTHER; note = 2'-deoxy-2'-fluorouridine-3'-phosphate
  modified_base 12: mod_base = OTHER; note = 2'-O-methyluridine-3'-phosphate
  modified_base 13: mod_base = OTHER; note = 2'-deoxy-2'-fluoroguanosine-3'-phosphate
  modified_base 14: mod_base = OTHER; note = 2'-O-methylcytidine-3'-phosphate
  modified_base 15: mod_base = OTHER; note = 2'-deoxy-2'-fluorouridine-3'-phosphate
  modified_base 16: mod_base = OTHER; note = 2'-O-methylcytidine-3'-phosphate
  modified_base 17: mod_base = OTHER; note = 2'-deoxy-2'-fluorouridine-3'-phosphate
  modified_base 18: mod_base = OTHER; note = 2'-O-methyladenosine-3'-phosphate
  modified_base 19: mod_base = OTHER; note = 2'-deoxy-2'-fluorouridine-3'-phosphate
  modified_base 20: mod_base = OTHER; note = 2'-O-methyladenosine-3'-phosphate
  modified_base 21: mod_base = OTHER; note = 2'-deoxy-2'-fluoroadenosine-3'-phosphate ((2S,4R)-1-[29-[[2-(acetylamino)-2-deoxy-beta-D-galactopyra nosyl]oxy]-14,14-bis[[3-[[3-[[5-[[2-(acetylamino)-2-deoxy-b eta-D-galactopyranosyl]oxy]-1-oxopentyl]amino]propyl]amino] -3-oxopropoxy]methyl]-1,12,19,25-tetraoxo-16-oxa-13,20,24-t riazanonacos-1-yl]-4-hydroxy-2-pyrrolidinyl)methyl ester
aacagtgttcttgctctataa

SEQ ID NO: 160 - RNA, 21 nt, synthetic construct
  source 1..21: mol_type = other RNA
  modified_base 1: mod_base = OTHER; note = 2'-deoxy-2'-fluoroadenosine-3'-phosphorothioate
  modified_base 2: mod_base = OTHER; note = 2'-O-methyladenosine-3'-phosphorothioate
  modified_base 3: mod_base = OTHER; note = 2'-deoxy-2'-fluorocytidine-3'-phosphate
  modified_base 4: mod_base = OTHER; note = 2'-O-methyladenosine-3'-phosphate
  modified_base 5: mod_base = OTHER; note = 4'-(R)-methyl-9-(alpha-L-threofuranosyl)guanine 2'-phosphate
  modified_base 6: mod_base = OTHER; note = 2'-O-methyluridine-3'-phosphate
  modified_base 7: mod_base = OTHER; note = 2'-deoxy-2'-fluoroguanosine-3'-phosphate
  modified_base 8: mod_base = OTHER; note = 2'-O-methyluridine-3'-phosphate
  modified_base 9: mod_base = OTHER; note = 2'-deoxy-2'-fluorouridine-3'-phosphate
  modified_base 10: mod_base = OTHER; note = 2'-deoxy-2'-fluorocytidine-3'-phosphate
  modified_base 11: mod_base = OTHER; note = 2'-deoxy-2'-fluorouridine-3'-phosphate
  modified_base 12: mod_base = OTHER; note = 2'-O-methyluridine-3'-phosphate
  modified_base 13: mod_base = OTHER; note = 2'-deoxy-2'-fluoroguanosine-3'-phosphate
  modified_base 14: mod_base = OTHER; note = 2'-O-methylcytidine-3'-phosphate
  modified_base 15: mod_base = OTHER; note = 2'-deoxy-2'-fluorouridine-3'-phosphate
  modified_base 16: mod_base = OTHER; note = 2'-O-methylcytidine-3'-phosphate
  modified_base 17: mod_base = OTHER; note = 2'-deoxy-2'-fluorouridine-3'-phosphate
  modified_base 18: mod_base = OTHER; note = 2'-O-methyladenosine-3'-phosphate
  modified_base 19: mod_base = OTHER; note = 2'-deoxy-2'-fluorouridine-3'-phosphate
  modified_base 20: mod_base = OTHER; note = 2'-O-methyladenosine-3'-phosphate
  modified_base 21: mod_base = OTHER; note = 2'-deoxy-2'-fluoroadenosine-3'-phosphate ((2S,4R)-1-[29-[[2-(acetylamino)-2-deoxy-beta-D-galactopyra nosyl]oxy]-14,14-bis[[3-[[3-[[5-[[2-(acetylamino)-2-deoxy-b eta-D-galactopyranosyl]oxy]-1-oxopentyl]amino]propyl]amino] -3-oxopropoxy]methyl]-1,12,19,25-tetraoxo-16-oxa-13,20,24-t riazanonacos-1-yl]-4-hydroxy-2-pyrrolidinyl)methyl ester
aacagtgttcttgctctataa

SEQ ID NO: 161 - RNA, 21 nt, synthetic construct
  source 1..21: mol_type = other RNA
  modified_base 1: mod_base = OTHER; note = 2'-deoxy-2'-fluoroadenosine-3'-phosphorothioate
  modified_base 2: mod_base = OTHER; note = 2'-O-methyladenosine-3'-phosphorothioate
  modified_base 3: mod_base = OTHER; note = 2'-deoxy-2'-fluorocytidine-3'-phosphate
  modified_base 4: mod_base = OTHER; note = 2'-O-methyladenosine-3'-phosphate
  modified_base 5: mod_base = OTHER; note = 2'-deoxy-2'-fluoroguanosine-3'-phosphate
  modified_base 6: mod_base = OTHER; note = 4'-(R)-methyl-1-(alpha-L-threofuranosyl)thymine 2'-phosphate
  modified_base 7: mod_base = OTHER; note = 2'-deoxy-2'-fluoroguanosine-3'-phosphate
  modified_base 8: mod_base = OTHER; note = 2'-O-methyluridine-3'-phosphate
  modified_base 9: mod_base = OTHER; note = 2'-deoxy-2'-fluorouridine-3'-phosphate
  modified_base 10: mod_base = OTHER; note = 2'-deoxy-2'-fluorocytidine-3'-phosphate
  modified_base 11: mod_base = OTHER; note = 2'-deoxy-2'-fluorouridine-3'-phosphate
  modified_base 12: mod_base = OTHER; note = 2'-O-methyluridine-3'-phosphate
  modified_base 13: mod_base = OTHER; note = 2'-deoxy-2'-fluoroguanosine-3'-phosphate
  modified_base 14: mod_base = OTHER; note = 2'-O-methylcytidine-3'-phosphate
  modified_base 15: mod_base = OTHER; note = 2'-deoxy-2'-fluorouridine-3'-phosphate
  modified_base 16: mod_base = OTHER; note = 2'-O-methylcytidine-3'-phosphate
  modified_base 17: mod_base = OTHER; note = 2'-deoxy-2'-fluorouridine-3'-phosphate
  modified_base 18: mod_base = OTHER; note = 2'-O-methyladenosine-3'-phosphate
  modified_base 19: mod_base = OTHER; note = 2'-deoxy-2'-fluorouridine-3'-phosphate
  modified_base 20: mod_base = OTHER; note = 2'-O-methyladenosine-3'-phosphate
  modified_base 21: mod_base = OTHER; note = 2'-deoxy-2'-fluoroadenosine-3'-phosphate ((2S,4R)-1-[29-[[2-(acetylamino)-2-deoxy-beta-D-galactopyra nosyl]oxy]-14,14-bis[[3-[[3-[[5-[[2-(acetylamino)-2-deoxy-b eta-D-galactopyranosyl]oxy]-1-oxopentyl]amino]propyl]amino] -3-oxopropoxy]methyl]-1,12,19,25-tetraoxo-16-oxa-13,20,24-t riazanonacos-1-yl]-4-hydroxy-2-pyrrolidinyl)methyl ester
aacagtgttcttgctctataa

SEQ ID NO: 162 - RNA, 21 nt, synthetic construct
  source 1..21: mol_type = other RNA
  modified_base 1: mod_base = OTHER; note = 2'-deoxy-2'-fluoroadenosine-3'-phosphorothioate
  modified_base 2: mod_base = OTHER; note = 2'-O-methyladenosine-3'-phosphorothioate
  modified_base 3: mod_base = OTHER; note = 2'-deoxy-2'-fluorocytidine-3'-phosphate
  modified_base 4: mod_base = OTHER; note = 2'-O-methyladenosine-3'-phosphate
  modified_base 5: mod_base = OTHER; note = 2'-deoxy-2'-fluoroguanosine-3'-phosphate
  modified_base 6: mod_base = OTHER; note = 2'-O-methyluridine-3'-phosphate
  modified_base 7: mod_base = OTHER; note = 4'-(R)-methyl-9-(alpha-L-threofuranosyl)guanine 2'-phosphate
  modified_base 8: mod_base = OTHER; note = 2'-O-methyluridine-3'-phosphate
  modified_base 9: mod_base = OTHER; note = 2'-deoxy-2'-fluorouridine-3'-phosphate
  modified_base 10: mod_base = OTHER; note = 2'-deoxy-2'-fluorocytidine-3'-phosphate
  modified_base 11: mod_base = OTHER; note = 2'-deoxy-2'-fluorouridine-3'-phosphate
  modified_base 12: mod_base = OTHER; note = 2'-O-methyluridine-3'-phosphate
  modified_base 13: mod_base = OTHER; note = 2'-deoxy-2'-fluoroguanosine-3'-phosphate
  modified_base 14: mod_base = OTHER; note = 2'-O-methylcytidine-3'-phosphate
  modified_base 15: mod_base = OTHER; note = 2'-deoxy-2'-fluorouridine-3'-phosphate
  modified_base 16: mod_base = OTHER; note = 2'-O-methylcytidine-3'-phosphate
  modified_base 17: mod_base = OTHER; note = 2'-deoxy-2'-fluorouridine-3'-phosphate
  modified_base 18: mod_base = OTHER; note = 2'-O-methyladenosine-3'-phosphate
  modified_base 19: mod_base = OTHER; note = 2'-deoxy-2'-fluorouridine-3'-phosphate
  modified_base 20: mod_base = OTHER; note = 2'-O-methyladenosine-3'-phosphate
  modified_base 21: mod_base = OTHER; note = 2'-deoxy-2'-fluoroadenosine-3'-phosphate ((2S,4R)-1-[29-[[2-(acetylamino)-2-deoxy-beta-D-galactopyra nosyl]oxy]-14,14-bis[[3-[[3-[[5-[[2-(acetylamino)-2-deoxy-b eta-D-galactopyranosyl]oxy]-1-oxopentyl]amino]propyl]amino] -3-oxopropoxy]methyl]-1,12,19,25-tetraoxo-16-oxa-13,20,24-t riazanonacos-1-yl]-4-hydroxy-2-pyrrolidinyl)methyl ester
aacagtgttcttgctctataa

SEQ ID NO: 163 - RNA, 21 nt, synthetic construct
  source 1..21: mol_type = other RNA
  modified_base 1: mod_base = OTHER; note = 2'-deoxy-2'-fluoroadenosine-3'-phosphorothioate
  modified_base 2: mod_base = OTHER; note = 2'-O-methyladenosine-3'-phosphorothioate
  modified_base 3: mod_base = OTHER; note = 2'-deoxy-2'-fluorocytidine-3'-phosphate
  modified_base 4: mod_base = OTHER; note = 2'-O-methyladenosine-3'-phosphate
  modified_base 5: mod_base = OTHER; note = 2'-deoxy-2'-fluoroguanosine-3'-phosphate
  modified_base 6: mod_base = OTHER; note = 2'-O-methyluridine-3'-phosphate
  modified_base 7: mod_base = OTHER; note = 2'-deoxy-2'-fluoroguanosine-3'-phosphate
  modified_base 8: mod_base = OTHER; note = 4'-(R)-methyl-1-(alpha-L-threofuranosyl)thymine 2'-phosphate
  modified_base 9: mod_base = OTHER; note = 2'-deoxy-2'-fluorouridine-3'-phosphate
  modified_base 10: mod_base = OTHER; note = 2'-deoxy-2'-fluorocytidine-3'-phosphate
  modified_base 11: mod_base = OTHER; note = 2'-deoxy-2'-fluorouridine-3'-phosphate
  modified_base 12: mod_base = OTHER; note = 2'-O-methyluridine-3'-phosphate
  modified_base 13: mod_base = OTHER; note = 2'-deoxy-2'-fluoroguanosine-3'-phosphate
  modified_base 14: mod_base = OTHER; note = 2'-O-methylcytidine-3'-phosphate
  modified_base 15: mod_base = OTHER; note = 2'-deoxy-2'-fluorouridine-3'-phosphate
  modified_base 16: mod_base = OTHER; note = 2'-O-methylcytidine-3'-phosphate
  modified_base 17: mod_base = OTHER; note = 2'-deoxy-2'-fluorouridine-3'-phosphate
  modified_base 18: mod_base = OTHER; note = 2'-O-methyladenosine-3'-phosphate
  modified_base 19: mod_base = OTHER; note = 2'-deoxy-2'-fluorouridine-3'-phosphate
  modified_base 20: mod_base = OTHER; note = 2'-O-methyladenosine-3'-phosphate
  modified_base 21: mod_base = OTHER; note = 2'-deoxy-2'-fluoroadenosine-3'-phosphate ((2S,4R)-1-[29-[[2-(acetylamino)-2-deoxy-beta-D-galactopyra nosyl]oxy]-14,14-bis[[3-[[3-[[5-[[2-(acetylamino)-2-deoxy-b eta-D-galactopyranosyl]oxy]-1-oxopentyl]amino]propyl]amino] -3-oxopropoxy]methyl]-1,12,19,25-tetraoxo-16-oxa-13,20,24-t riazanonacos-1-yl]-4-hydroxy-2-pyrrolidinyl)methyl ester
aacagtgttcttgctctataa

SEQ ID NO: 164 - RNA, 21 nt, synthetic construct
  source 1..21: mol_type = other RNA
  modified_base 1: mod_base = OTHER; note = 2'-deoxy-2'-fluoroadenosine-3'-phosphorothioate
  modified_base 2: mod_base = OTHER; note = 2'-O-methyladenosine-3'-phosphorothioate
  modified_base 3: mod_base = OTHER; note = 2'-deoxy-2'-fluorocytidine-3'-phosphate
  modified_base 4: mod_base = OTHER; note = 2'-O-methyladenosine-3'-phosphate
  modified_base 5: mod_base = OTHER; note = 2'-deoxy-2'-fluoroguanosine-3'-phosphate
  modified_base 6: mod_base = OTHER; note = 2'-O-methyluridine-3'-phosphate
  modified_base 7: mod_base = OTHER; note = 2'-deoxy-2'-fluoroguanosine-3'-phosphate
  modified_base 8: mod_base = OTHER; note = 2'-O-methyluridine-3'-phosphate
  modified_base 9: mod_base = OTHER; note = 4'-(R)-methyl-1-(alpha-L-threofuranosyl)thymine 2'-phosphate
  modified_base 10: mod_base = OTHER; note = 2'-deoxy-2'-fluorocytidine-3'-phosphate
  modified_base 11: mod_base = OTHER; note = 2'-deoxy-2'-fluorouridine-3'-phosphate
  modified_base 12: mod_base = OTHER; note = 2'-O-methyluridine-3'-phosphate
  modified_base 13: mod_base = OTHER; note = 2'-deoxy-2'-fluoroguanosine-3'-phosphate
  modified_base 14: mod_base = OTHER; note = 2'-O-methylcytidine-3'-phosphate
  modified_base 15: mod_base = OTHER; note = 2'-deoxy-2'-fluorouridine-3'-phosphate
  modified_base 16: mod_base = OTHER; note = 2'-O-methylcytidine-3'-phosphate
  modified_base 17: mod_base = OTHER; note = 2'-deoxy-2'-fluorouridine-3'-phosphate
  modified_base 18: mod_base = OTHER; note = 2'-O-methyladenosine-3'-phosphate
  modified_base 19: mod_base = OTHER; note = 2'-deoxy-2'-fluorouridine-3'-phosphate
  modified_base 20: mod_base = OTHER; note = 2'-O-methyladenosine-3'-phosphate
  modified_base 21: mod_base = OTHER; note = 2'-deoxy-2'-fluoroadenosine-3'-phosphate ((2S,4R)-1-[29-[[2-(acetylamino)-2-deoxy-beta-D-galactopyra nosyl]oxy]-14,14-bis[[3-[[3-[[5-[[2-(acetylamino)-2-deoxy-b eta-D-galactopyranosyl]oxy]-1-oxopentyl]amino]propyl]amino] -3-oxopropoxy]methyl]-1,12,19,25-tetraoxo-16-oxa-13,20,24-t riazanonacos-1-yl]-4-hydroxy-2-pyrrolidinyl)methyl ester
aacagtgttcttgctctataa

SEQ ID NO: 165 - RNA, 21 nt, synthetic construct
  source 1..21: mol_type = other RNA
  modified_base 1: mod_base = OTHER; note = 2'-deoxy-2'-fluoroadenosine-3'-phosphorothioate
  modified_base 2: mod_base = OTHER; note = 2'-O-methyladenosine-3'-phosphorothioate
  modified_base 3: mod_base = OTHER; note = 2'-deoxy-2'-fluorocytidine-3'-phosphate
  modified_base 4: mod_base = OTHER; note = 2'-O-methyladenosine-3'-phosphate
  modified_base 5: mod_base = OTHER; note = 2'-deoxy-2'-fluoroguanosine-3'-phosphate
  modified_base 6: mod_base = OTHER; note = 2'-O-methyluridine-3'-phosphate
  modified_base 7: mod_base = OTHER; note = 2'-deoxy-2'-fluoroguanosine-3'-phosphate
  modified_base 8: mod_base = OTHER; note = 2'-O-methyluridine-3'-phosphate
  modified_base 9: mod_base = OTHER; note = 2'-deoxy-2'-fluorouridine-3'-phosphate
  modified_base 10: mod_base = OTHER; note = 4'-(R)-methyl-1-(alpha-L-threofuranosyl)cytosine 2'-phosphate
  modified_base 11: mod_base = OTHER; note = 2'-deoxy-2'-fluorouridine-3'-phosphate
  modified_base 12: mod_base = OTHER; note = 2'-O-methyluridine-3'-phosphate
  modified_base 13: mod_base = OTHER; note = 2'-deoxy-2'-fluoroguanosine-3'-phosphate
  modified_base 14: mod_base = OTHER; note = 2'-O-methylcytidine-3'-phosphate
  modified_base 15: mod_base = OTHER; note = 2'-deoxy-2'-fluorouridine-3'-phosphate
  modified_base 16: mod_base = OTHER; note = 2'-O-methylcytidine-3'-phosphate
  modified_base 17: mod_base = OTHER; note = 2'-deoxy-2'-fluorouridine-3'-phosphate
  modified_base 18: mod_base = OTHER; note = 2'-O-methyladenosine-3'-phosphate
  modified_base 19: mod_base = OTHER; note = 2'-deoxy-2'-fluorouridine-3'-phosphate
  modified_base 20: mod_base = OTHER; note = 2'-O-methyladenosine-3'-phosphate
  modified_base 21: mod_base = OTHER; note = 2'-deoxy-2'-fluoroadenosine-3'-phosphate ((2S,4R)-1-[29-[[2-(acetylamino)-2-deoxy-beta-D-galactopyra nosyl]oxy]-14,14-bis[[3-[[3-[[5-[[2-(acetylamino)-2-deoxy-b eta-D-galactopyranosyl]oxy]-1-oxopentyl]amino]propyl]amino] -3-oxopropoxy]methyl]-1,12,19,25-tetraoxo-16-oxa-13,20,24-t riazanonacos-1-yl]-4-hydroxy-2-pyrrolidinyl)methyl ester
aacagtgttcttgctctataa

SEQ ID NO: 166 - RNA, 21 nt, synthetic construct
  source 1..21: mol_type = other RNA
  modified_base 1: mod_base = OTHER; note = 2'-deoxy-2'-fluoroadenosine-3'-phosphorothioate
  modified_base 2: mod_base = OTHER; note = 2'-O-methyladenosine-3'-phosphorothioate
  modified_base 3: mod_base = OTHER; note = 2'-deoxy-2'-fluorocytidine-3'-phosphate
  modified_base 4: mod_base = OTHER; note = 2'-O-methyladenosine-3'-phosphate
  modified_base 5: mod_base = OTHER; note = 2'-deoxy-2'-fluoroguanosine-3'-phosphate
  modified_base 6: mod_base = OTHER; note = 2'-O-methyluridine-3'-phosphate
  modified_base 7: mod_base = OTHER; note = 2'-deoxy-2'-fluoroguanosine-3'-phosphate
  modified_base 8: mod_base = OTHER; note = 2'-O-methyluridine-3'-phosphate
  modified_base 9: mod_base = OTHER; note = 2'-deoxy-2'-fluorouridine-3'-phosphate
  modified_base 10: mod_base = OTHER; note = 2'-deoxy-2'-fluorocytidine-3'-phosphate
  modified_base 11: mod_base = OTHER; note = 4'-(R)-methyl-1-(alpha-L-threofuranosyl)thymine 2'-phosphate
  modified_base 12: mod_base = OTHER; note = 2'-O-methyluridine-3'-phosphate
  modified_base 13: mod_base = OTHER; note = 2'-deoxy-2'-fluoroguanosine-3'-phosphate
  modified_base 14: mod_base = OTHER; note = 2'-O-methylcytidine-3'-phosphate
  modified_base 15: mod_base = OTHER; note = 2'-deoxy-2'-fluorouridine-3'-phosphate
  modified_base 16: mod_base = OTHER; note = 2'-O-methylcytidine-3'-phosphate
  modified_base 17: mod_base = OTHER; note = 2'-deoxy-2'-fluorouridine-3'-phosphate
  modified_base 18: mod_base = OTHER; note = 2'-O-methyladenosine-3'-phosphate
  modified_base 19: mod_base = OTHER; note = 2'-deoxy-2'-fluorouridine-3'-phosphate
  modified_base 20: mod_base = OTHER; note = 2'-O-methyladenosine-3'-phosphate
  modified_base 21: mod_base = OTHER; note = 2'-deoxy-2'-fluoroadenosine-3'-phosphate ((2S,4R)-1-[29-[[2-(acetylamino)-2-deoxy-beta-D-galactopyra nosyl]oxy]-14,14-bis[[3-[[3-[[5-[[2-(acetylamino)-2-deoxy-b eta-D-galactopyranosyl]oxy]-1-oxopentyl]amino]propyl]amino] -3-oxopropoxy]methyl]-1,12,19,25-tetraoxo-16-oxa-13,20,24-t riazanonacos-1-yl]-4-hydroxy-2-pyrrolidinyl)methyl ester
aacagtgttcttgctctataa

SEQ ID NO: 167 - RNA, 21 nt, synthetic construct
  source 1..21: mol_type = other RNA
  modified_base 1: mod_base = OTHER; note = 2'-deoxy-2'-fluoroadenosine-3'-phosphorothioate
  modified_base 2: mod_base = OTHER; note = 2'-O-methyladenosine-3'-phosphorothioate
  modified_base 3: mod_base = OTHER; note = 2'-deoxy-2'-fluorocytidine-3'-phosphate
  modified_base 4: mod_base = OTHER; note = 2'-O-methyladenosine-3'-phosphate
  modified_base 5: mod_base = OTHER; note = 2'-deoxy-2'-fluoroguanosine-3'-phosphate
  modified_base 6: mod_base = OTHER; note = 2'-O-methyluridine-3'-phosphate
  modified_base 7: mod_base = OTHER; note = 2'-deoxy-2'-fluoroguanosine-3'-phosphate
  modified_base 8: mod_base = OTHER; note = 2'-O-methyluridine-3'-phosphate
  modified_base 9: mod_base = OTHER; note = 2'-deoxy-2'-fluorouridine-3'-phosphate
  modified_base 10: mod_base = OTHER; note = 2'-deoxy-2'-fluorocytidine-3'-phosphate
  modified_base 11: mod_base = OTHER; note = 2'-deoxy-2'-fluorouridine-3'-phosphate
  modified_base 12: mod_base = OTHER; note = 4'-(R)-methyl-1-(alpha-L-threofuranosyl)thymine 2'-phosphate
  modified_base 13: mod_base = OTHER; note = 2'-deoxy-2'-fluoroguanosine-3'-phosphate
  modified_base 14: mod_base = OTHER; note = 2'-O-methylcytidine-3'-phosphate
  modified_base 15: mod_base = OTHER; note = 2'-deoxy-2'-fluorouridine-3'-phosphate
  modified_base 16: mod_base = OTHER; note = 2'-O-methylcytidine-3'-phosphate
  modified_base 17: mod_base = OTHER; note = 2'-deoxy-2'-fluorouridine-3'-phosphate
  modified_base 18: mod_base = OTHER; note = 2'-O-methyladenosine-3'-phosphate
  modified_base 19: mod_base = OTHER; note = 2'-deoxy-2'-fluorouridine-3'-phosphate
  modified_base 20: mod_base = OTHER; note = 2'-O-methyladenosine-3'-phosphate
  modified_base 21: mod_base = OTHER; note = 2'-deoxy-2'-fluoroadenosine-3'-phosphate ((2S,4R)-1-[29-[[2-(acetylamino)-2-deoxy-beta-D-galactopyra nosyl]oxy]-14,14-bis[[3-[[3-[[5-[[2-(acetylamino)-2-deoxy-b eta-D-galactopyranosyl]oxy]-1-oxopentyl]amino]propyl]amino] -3-oxopropoxy]methyl]-1,12,19,25-tetraoxo-16-oxa-13,20,24-t riazanonacos-1-yl]-4-hydroxy-2-pyrrolidinyl)methyl ester
aacagtgttcttgctctataa

SEQ ID NO: 168 - RNA, 21 nt, synthetic construct
  source 1..21: mol_type = other RNA
  modified_base 1: mod_base = OTHER; note = 2'-deoxy-2'-fluoroadenosine-3'-phosphorothioate
  modified_base 2: mod_base = OTHER; note = 2'-O-methyladenosine-3'-phosphorothioate
  modified_base 3: mod_base = OTHER; note = 2'-deoxy-2'-fluorocytidine-3'-phosphate
  modified_base 4: mod_base = OTHER; note = 2'-O-methyladenosine-3'-phosphate
  modified_base 5: mod_base = OTHER; note = 2'-deoxy-2'-fluoroguanosine-3'-phosphate
  modified_base 6: mod_base = OTHER; note = 2'-O-methyluridine-3'-phosphate
  modified_base 7: mod_base = OTHER; note = 2'-deoxy-2'-fluoroguanosine-3'-phosphate
  modified_base 8: mod_base = OTHER; note = 2'-O-methyluridine-3'-phosphate
  modified_base 9: mod_base = OTHER; note = 2'-deoxy-2'-fluorouridine-3'-phosphate
  modified_base 10: mod_base = OTHER; note = 2'-deoxy-2'-fluorocytidine-3'-phosphate
  modified_base 11: mod_base = OTHER; note = 2'-deoxy-2'-fluorouridine-3'-phosphate
  modified_base 12: mod_base = OTHER; note = 2'-O-methyluridine-3'-phosphate
  modified_base 13: mod_base = OTHER; note = 4'-(R)-methyl-9-(alpha-L-threofuranosyl)guanine 2'-phosphate
  modified_base 14: mod_base = OTHER; note = 2'-O-methylcytidine-3'-phosphate
  modified_base 15: mod_base = OTHER; note = 2'-deoxy-2'-fluorouridine-3'-phosphate
  modified_base 16: mod_base = OTHER; note = 2'-O-methylcytidine-3'-phosphate
  modified_base 17: mod_base = OTHER; note = 2'-deoxy-2'-fluorouridine-3'-phosphate
  modified_base 18: mod_base = OTHER; note = 2'-O-methyladenosine-3'-phosphate
  modified_base 19: mod_base = OTHER; note = 2'-deoxy-2'-fluorouridine-3'-phosphate
  modified_base 20: mod_base = OTHER; note = 2'-O-methyladenosine-3'-phosphate
  modified_base 21: mod_base = OTHER; note = 2'-deoxy-2'-fluoroadenosine-3'-phosphate ((2S,4R)-1-[29-[[2-(acetylamino)-2-deoxy-beta-D-galactopyra nosyl]oxy]-14,14-bis[[3-[[3-[[5-[[2-(acetylamino)-2-deoxy-b eta-D-galactopyranosyl]oxy]-1-oxopentyl]amino]propyl]amino] -3-oxopropoxy]methyl]-1,12,19,25-tetraoxo-16-oxa-13,20,24-t riazanonacos-1-yl]-4-hydroxy-2-pyrrolidinyl)methyl ester
aacagtgttcttgctctataa

SEQ ID NO: 169 - RNA, 21 nt, synthetic construct
  source 1..21: mol_type = other RNA
  modified_base 1: mod_base = OTHER; note = 2'-deoxy-2'-fluoroadenosine-3'-phosphorothioate
  modified_base 2: mod_base = OTHER; note = 2'-O-methyladenosine-3'-phosphorothioate
  modified_base 3: mod_base = OTHER; note = 2'-deoxy-2'-fluorocytidine-3'-phosphate
  modified_base 4: mod_base = OTHER; note = 2'-O-methyladenosine-3'-phosphate
  modified_base 5: mod_base = OTHER; note = 2'-deoxy-2'-fluoroguanosine-3'-phosphate
  modified_base 6: mod_base = OTHER; note = 2'-O-methyluridine-3'-phosphate
  modified_base 7: mod_base = OTHER; note = 2'-deoxy-2'-fluoroguanosine-3'-phosphate
  modified_base 8: mod_base = OTHER; note = 2'-O-methyluridine-3'-phosphate
  modified_base 9: mod_base = OTHER; note = 2'-deoxy-2'-fluorouridine-3'-phosphate
  modified_base 10: mod_base = OTHER; note = 2'-deoxy-2'-fluorocytidine-3'-phosphate
  modified_base 11: mod_base = OTHER; note = 2'-deoxy-2'-fluorouridine-3'-phosphate
  modified_base 12: mod_base = OTHER; note = 2'-O-methyluridine-3'-phosphate
  modified_base 13: mod_base = OTHER; note = 2'-deoxy-2'-fluoroguanosine-3'-phosphate
  modified_base 14: mod_base = OTHER; note = 4'-(R)-methyl-1-(alpha-L-threofuranosyl)cytosine 2'-phosphate
  modified_base 15: mod_base = OTHER; note = 2'-deoxy-2'-fluorouridine-3'-phosphate
  modified_base 16: mod_base = OTHER; note = 2'-O-methylcytidine-3'-phosphate
  modified_base 17: mod_base = OTHER; note = 2'-deoxy-2'-fluorouridine-3'-phosphate
  modified_base 18: mod_base = OTHER; note = 2'-O-methyladenosine-3'-phosphate
  modified_base 19: mod_base = OTHER; note = 2'-deoxy-2'-fluorouridine-3'-phosphate
  modified_base 20: mod_base = OTHER; note = 2'-O-methyladenosine-3'-phosphate
  modified_base 21: mod_base = OTHER; note = 2'-deoxy-2'-fluoroadenosine-3'-phosphate ((2S,4R)-1-[29-[[2-(acetylamino)-2-deoxy-beta-D-galactopyra nosyl]oxy]-14,14-bis[[3-[[3-[[5-[[2-(acetylamino)-2-deoxy-b eta-D-galactopyranosyl]oxy]-1-oxopentyl]amino]propyl]amino] -3-oxopropoxy]methyl]-1,12,19,25-tetraoxo-16-oxa-13,20,24-t riazanonacos-1-yl]-4-hydroxy-2-pyrrolidinyl)methyl ester
aacagtgttcttgctctataa

SEQ ID NO: 170 - RNA, 21 nt, synthetic construct
  source 1..21: mol_type = other RNA
  modified_base 1: mod_base = OTHER; note = 2'-deoxy-2'-fluoroadenosine-3'-phosphorothioate
  modified_base 2: mod_base = OTHER; note = 2'-O-methyladenosine-3'-phosphorothioate
  modified_base 3: mod_base = OTHER; note = 2'-deoxy-2'-fluorocytidine-3'-phosphate
  modified_base 4: mod_base = OTHER; note = 2'-O-methyladenosine-3'-phosphate
  modified_base 5: mod_base = OTHER; note = 2'-deoxy-2'-fluoroguanosine-3'-phosphate
  modified_base 6: mod_base = OTHER; note = 2'-O-methyluridine-3'-phosphate
  modified_base 7: mod_base = OTHER; note = 2'-deoxy-2'-fluoroguanosine-3'-phosphate
  modified_base 8: mod_base = OTHER; note = 2'-O-methyluridine-3'-phosphate
  modified_base 9: mod_base = OTHER; note = 2'-deoxy-2'-fluorouridine-3'-phosphate
  modified_base 10: mod_base = OTHER; note = 2'-deoxy-2'-fluorocytidine-3'-phosphate
  modified_base 11: mod_base = OTHER; note = 2'-deoxy-2'-fluorouridine-3'-phosphate
  modified_base 12: mod_base = OTHER; note = 2'-O-methyluridine-3'-phosphate
  modified_base 13: mod_base = OTHER; note = 2'-deoxy-2'-fluoroguanosine-3'-phosphate
  modified_base 14: mod_base = OTHER; note = 2'-O-methylcytidine-3'-phosphate
  modified_base 15: mod_base = OTHER; note = 4'-(R)-methyl-1-(alpha-L-threofuranosyl)thymine 2'-phosphate
  modified_base 16: mod_base = OTHER; note = 2'-O-methylcytidine-3'-phosphate
  modified_base 17: mod_base = OTHER; note = 2'-deoxy-2'-fluorouridine-3'-phosphate
  modified_base 18: mod_base = OTHER; note = 2'-O-methyladenosine-3'-phosphate
  modified_base 19: mod_base = OTHER; note = 2'-deoxy-2'-fluorouridine-3'-phosphate
  modified_base 20: mod_base = OTHER; note = 2'-O-methyladenosine-3'-phosphate
  modified_base 21: mod_base = OTHER; note = 2'-deoxy-2'-fluoroadenosine-3'-phosphate ((2S,4R)-1-[29-[[2-(acetylamino)-2-deoxy-beta-D-galactopyra nosyl]oxy]-14,14-bis[[3-[[3-[[5-[[2-(acetylamino)-2-deoxy-b eta-D-galactopyranosyl]oxy]-1-oxopentyl]amino]propyl]amino] -3-oxopropoxy]methyl]-1,12,19,25-tetraoxo-16-oxa-13,20,24-t riazanonacos-1-yl]-4-hydroxy-2-pyrrolidinyl)methyl ester
aacagtgttcttgctctataa

SEQ ID NO: 171 - RNA, 21 nt, synthetic construct
  source 1..21: mol_type = other RNA
  modified_base 1: mod_base = OTHER; note = 2'-deoxy-2'-fluoroadenosine-3'-phosphorothioate
  modified_base 2: mod_base = OTHER; note = 2'-O-methyladenosine-3'-phosphorothioate
  modified_base 3: mod_base = OTHER; note = 2'-deoxy-2'-fluorocytidine-3'-phosphate
  modified_base 4: mod_base = OTHER; note = 2'-O-methyladenosine-3'-phosphate
  modified_base 5: mod_base = OTHER; note = 2'-deoxy-2'-fluoroguanosine-3'-phosphate
  modified_base 6: mod_base = OTHER; note = 2'-O-methyluridine-3'-phosphate
  modified_base 7: mod_base = OTHER; note = 2'-deoxy-2'-fluoroguanosine-3'-phosphate
  modified_base 8: mod_base = OTHER; note = 2'-O-methyluridine-3'-phosphate
  modified_base 9: mod_base = OTHER; note = 2'-deoxy-2'-fluorouridine-3'-phosphate
  modified_base 10: mod_base = OTHER; note = 2'-deoxy-2'-fluorocytidine-3'-phosphate
  modified_base 11: mod_base = OTHER; note = 2'-deoxy-2'-fluorouridine-3'-phosphate
  modified_base 12: mod_base = OTHER; note = 2'-O-methyluridine-3'-phosphate
  modified_base 13: mod_base = OTHER; note = 2'-deoxy-2'-fluoroguanosine-3'-phosphate
  modified_base 14: mod_base = OTHER; note = 2'-O-methylcytidine-3'-phosphate
  modified_base 15: mod_base = OTHER; note = 2'-deoxy-2'-fluorouridine-3'-phosphate
  modified_base 16: mod_base = OTHER; note = 4'-(R)-methyl-1-(alpha-L-threofuranosyl)cytosine 2'-phosphate
  modified_base 17: mod_base = OTHER; note = 2'-deoxy-2'-fluorouridine-3'-phosphate
  modified_base 18: mod_base = OTHER; note = 2'-O-methyladenosine-3'-phosphate
  modified_base 19: mod_base = OTHER; note = 2'-deoxy-2'-fluorouridine-3'-phosphate
  modified_base 20: mod_base = OTHER; note = 2'-O-methyladenosine-3'-phosphate
  modified_base 21: mod_base = OTHER; note = 2'-deoxy-2'-fluoroadenosine-3'-phosphate ((2S,4R)-1-[29-[[2-(acetylamino)-2-deoxy-beta-D-galactopyra nosyl]oxy]-14,14-bis[[3-[[3-[[5-[[2-(acetylamino)-2-deoxy-b eta-D-galactopyranosyl]oxy]-1-oxopentyl]amino]propyl]amino] -3-oxopropoxy]methyl]-1,12,19,25-tetraoxo-16-oxa-13,20,24-t riazanonacos-1-yl]-4-hydroxy-2-pyrrolidinyl)methyl ester
aacagtgttcttgctctataa

SEQ ID NO: 172 - RNA, 21 nt, synthetic construct
  source 1..21: mol_type = other RNA
  modified_base 1: mod_base = OTHER; note = 2'-deoxy-2'-fluoroadenosine-3'-phosphorothioate
  modified_base 2: mod_base = OTHER; note = 2'-O-methyladenosine-3'-phosphorothioate
  modified_base 3: mod_base = OTHER; note = 2'-deoxy-2'-fluorocytidine-3'-phosphate
  modified_base 4: mod_base = OTHER; note = 2'-O-methyladenosine-3'-phosphate
  modified_base 5: mod_base = OTHER; note = 2'-deoxy-2'-fluoroguanosine-3'-phosphate
  modified_base 6: mod_base = OTHER; note = 2'-O-methyluridine-3'-phosphate
  modified_base 7: mod_base = OTHER; note = 2'-deoxy-2'-fluoroguanosine-3'-phosphate
  modified_base 8: mod_base = OTHER; note = 2'-O-methyluridine-3'-phosphate
  modified_base 9: mod_base = OTHER; note = 2'-deoxy-2'-fluorouridine-3'-phosphate
  modified_base 10: mod_base = OTHER; note = 2'-deoxy-2'-fluorocytidine-3'-phosphate
  modified_base 11: mod_base = OTHER; note = 2'-deoxy-2'-fluorouridine-3'-phosphate
  modified_base 12: mod_base = OTHER; note = 2'-O-methyluridine-3'-phosphate
  modified_base 13: mod_base = OTHER; note = 2'-deoxy-2'-fluoroguanosine-3'-phosphate
  modified_base 14: mod_base = OTHER; note = 2'-O-methylcytidine-3'-phosphate
  modified_base 15: mod_base = OTHER; note = 2'-deoxy-2'-fluorouridine-3'-phosphate
  modified_base 16: mod_base = OTHER; note = 2'-O-methylcytidine-3'-phosphate
  modified_base 17: mod_base = OTHER; note = 4'-(R)-methyl-1-(alpha-L-threofuranosyl)thymine 2'-phosphate
  modified_base 18: mod_base = OTHER; note = 2'-O-methyladenosine-3'-phosphate
  modified_base 19: mod_base = OTHER; note = 2'-deoxy-2'-fluorouridine-3'-phosphate
  modified_base 20: mod_base = OTHER; note = 2'-O-methyladenosine-3'-phosphate
  modified_base 21: mod_base = OTHER; note = 2'-deoxy-2'-fluoroadenosine-3'-phosphate ((2S,4R)-1-[29-[[2-(acetylamino)-2-deoxy-beta-D-galactopyra nosyl]oxy]-14,14-bis[[3-[[3-[[5-[[2-(acetylamino)-2-deoxy-b eta-D-galactopyranosyl]oxy]-1-oxopentyl]amino]propyl]amino] -3-oxopropoxy]methyl]-1,12,19,25-tetraoxo-16-oxa-13,20,24-t riazanonacos-1-yl]-4-hydroxy-2-pyrrolidinyl)methyl ester
aacagtgttcttgctctataa

SEQ ID NO: 173 - RNA, 21 nt, synthetic construct
  source 1..21: mol_type = other RNA
  modified_base 1: mod_base = OTHER; note = 2'-deoxy-2'-fluoroadenosine-3'-phosphorothioate
  modified_base 2: mod_base = OTHER; note = 2'-O-methyladenosine-3'-phosphorothioate
  modified_base 3: mod_base = OTHER; note = 2'-deoxy-2'-fluorocytidine-3'-phosphate
  modified_base 4: mod_base = OTHER; note = 2'-O-methyladenosine-3'-phosphate
  modified_base 5: mod_base = OTHER; note = 2'-deoxy-2'-fluoroguanosine-3'-phosphate
  modified_base 6: mod_base = OTHER; note = 2'-O-methyluridine-3'-phosphate
  modified_base 7: mod_base = OTHER; note = 2'-deoxy-2'-fluoroguanosine-3'-phosphate
  modified_base 8: mod_base = OTHER; note = 2'-O-methyluridine-3'-phosphate
  modified_base 9: mod_base = OTHER; note = 2'-deoxy-2'-fluorouridine-3'-phosphate
  modified_base 10: mod_base = OTHER; note = 2'-deoxy-2'-fluorocytidine-3'-phosphate
  modified_base 11: mod_base = OTHER; note = 2'-deoxy-2'-fluorouridine-3'-phosphate
  modified_base 12: mod_base = OTHER; note = 2'-O-methyluridine-3'-phosphate
  modified_base 13: mod_base = OTHER; note = 2'-deoxy-2'-fluoroguanosine-3'-phosphate
  modified_base 14: mod_base = OTHER; note = 2'-O-methylcytidine-3'-phosphate
  modified_base 15: mod_base = OTHER; note = 2'-deoxy-2'-fluorouridine-3'-phosphate
  modified_base 16: mod_base = OTHER; note = 2'-O-methylcytidine-3'-phosphate
  modified_base 17: mod_base = OTHER; note = 2'-deoxy-2'-fluorouridine-3'-phosphate
  modified_base 18: mod_base = OTHER; note = 4'-(R)-methyl-9-(alpha-L-threofuranosyl)adenine 2'-phosphate
  modified_base 19: mod_base = OTHER; note = 2'-deoxy-2'-fluorouridine-3'-phosphate
  modified_base 20: mod_base = OTHER; note = 2'-O-methyladenosine-3'-phosphate
  modified_base 21: mod_base = OTHER; note = 2'-deoxy-2'-fluoroadenosine-3'-phosphate ((2S,4R)-1-[29-[[2-(acetylamino)-2-deoxy-beta-D-galactopyra nosyl]oxy]-14,14-bis[[3-[[3-[[5-[[2-(acetylamino)-2-deoxy-b eta-D-galactopyranosyl]oxy]-1-oxopentyl]amino]propyl]amino] -3-oxopropoxy]methyl]-1,12,19,25-tetraoxo-16-oxa-13,20,24-t riazanonacos-1-yl]-4-hydroxy-2-pyrrolidinyl)methyl ester
aacagtgttcttgctctataa

SEQ ID NO: 174 - RNA, 21 nt, synthetic construct
  source 1..21: mol_type = other RNA
  modified_base 1: mod_base = OTHER; note = 2'-deoxy-2'-fluoroadenosine-3'-phosphorothioate
  modified_base 2: mod_base = OTHER; note = 2'-O-methyladenosine-3'-phosphorothioate
  modified_base 3: mod_base = OTHER; note = 2'-deoxy-2'-fluorocytidine-3'-phosphate
  modified_base 4: mod_base = OTHER; note = 2'-O-methyladenosine-3'-phosphate
  modified_base 5: mod_base = OTHER; note = 2'-deoxy-2'-fluoroguanosine-3'-phosphate
  modified_base 6: mod_base = OTHER; note = 2'-O-methyluridine-3'-phosphate
  modified_base 7: mod_base = OTHER; note = 2'-deoxy-2'-fluoroguanosine-3'-phosphate
  modified_base 8: mod_base = OTHER; note = 2'-O-methyluridine-3'-phosphate
  modified_base 9: mod_base = OTHER; note = 2'-deoxy-2'-fluorouridine-3'-phosphate
  modified_base 10: mod_base = OTHER; note = 2'-deoxy-2'-fluorocytidine-3'-phosphate
  modified_base 11: mod_base = OTHER; note = 2'-deoxy-2'-fluorouridine-3'-phosphate
  modified_base 12: mod_base = OTHER; note = 2'-O-methyluridine-3'-phosphate
  modified_base 13: mod_base = OTHER; note = 2'-deoxy-2'-fluoroguanosine-3'-phosphate
  modified_base 14: mod_base = OTHER; note = 2'-O-methylcytidine-3'-phosphate
  modified_base 15: mod_base = OTHER; note = 2'-deoxy-2'-fluorouridine-3'-phosphate
  modified_base 16: mod_base = OTHER; note = 2'-O-methylcytidine-3'-phosphate
  modified_base 17: mod_base = OTHER; note = 2'-deoxy-2'-fluorouridine-3'-phosphate
  modified_base 18: mod_base = OTHER; note = 2'-O-methyladenosine-3'-phosphate
  modified_base 19: mod_base = OTHER; note = 4'-(R)-methyl-1-(alpha-L-threofuranosyl)thymine 2'-phosphate
  modified_base 20: mod_base = OTHER; note = 2'-O-methyladenosine-3'-phosphate
  modified_base 21: mod_base = OTHER; note = 2'-deoxy-2'-fluoroadenosine-3'-phosphate ((2S,4R)-1-[29-[[2-(acetylamino)-2-deoxy-beta-D-galactopyra nosyl]oxy]-14,14-bis[[3-[[3-[[5-[[2-(acetylamino)-2-deoxy-b eta-D-galactopyranosyl]oxy]-1-oxopentyl]amino]propyl]amino] -3-oxopropoxy]methyl]-1,12,19,25-tetraoxo-16-oxa-13,20,24-t riazanonacos-1-yl]-4-hydroxy-2-pyrrolidinyl)methyl ester
aacagtgttcttgctctataa

SEQ ID NO: 175 - RNA, 21 nt, synthetic construct
  source 1..21: mol_type = other RNA
  modified_base 1: mod_base = OTHER; note = 2'-deoxy-2'-fluoroadenosine-3'-phosphorothioate
  modified_base 2: mod_base = OTHER; note = 2'-O-methyladenosine-3'-phosphorothioate
  modified_base 3: mod_base = OTHER; note = 2'-deoxy-2'-fluorocytidine-3'-phosphate
  modified_base 4: mod_base = OTHER; note = 2'-O-methyladenosine-3'-phosphate
  modified_base 5: mod_base = OTHER; note = 2'-deoxy-2'-fluoroguanosine-3'-phosphate
  modified_base 6: mod_base = OTHER; note = 2'-O-methyluridine-3'-phosphate
  modified_base 7: mod_base = OTHER; note = 2'-deoxy-2'-fluoroguanosine-3'-phosphate
  modified_base 8: mod_base = OTHER; note = 2'-O-methyluridine-3'-phosphate
  modified_base 9: mod_base = OTHER; note = 2'-deoxy-2'-fluorouridine-3'-phosphate
  modified_base 10: mod_base = OTHER; note = 2'-deoxy-2'-fluorocytidine-3'-phosphate
  modified_base 11: mod_base = OTHER; note = 2'-deoxy-2'-fluorouridine-3'-phosphate
  modified_base 12: mod_base = OTHER; note = 2'-O-methyluridine-3'-phosphate
  modified_base 13: mod_base = OTHER; note = 2'-deoxy-2'-fluoroguanosine-3'-phosphate
  modified_base 14: mod_base = OTHER; note = 2'-O-methylcytidine-3'-phosphate
  modified_base 15: mod_base = OTHER; note = 2'-deoxy-2'-fluorouridine-3'-phosphate
  modified_base 16: mod_base = OTHER; note = 2'-O-methylcytidine-3'-phosphate
  modified_base 17: mod_base = OTHER; note = 2'-deoxy-2'-fluorouridine-3'-phosphate
  modified_base 18: mod_base = OTHER; note = 2'-O-methyladenosine-3'-phosphate
  modified_base 19: mod_base = OTHER; note = 2'-deoxy-2'-fluorouridine-3'-phosphate
  modified_base 20: mod_base = OTHER; note = 4'-(R)-methyl-9-(alpha-L-threofuranosyl)adenine 2'-phosphate
  modified_base 21: mod_base = OTHER; note = 2'-deoxy-2'-fluoroadenosine-3'-phosphate ((2S,4R)-1-[29-[[2-(acetylamino)-2-deoxy-beta-D-galactopyra nosyl]oxy]-14,14-bis[[3-[[3-[[5-[[2-(acetylamino)-2-deoxy-b eta-D-galactopyranosyl]oxy]-1-oxopentyl]amino]propyl]amino] -3-oxopropoxy]methyl]-1,12,19,25-tetraoxo-16-oxa-13,20,24-t riazanonacos-1-yl]-4-hydroxy-2-pyrrolidinyl)methyl ester
aacagtgttcttgctctataa

SEQ ID NO: 176 - RNA, 21 nt, synthetic construct
  source 1..21: mol_type = other RNA
  modified_base 1: mod_base = OTHER; note = 2'-deoxy-2'-fluoroadenosine-3'-phosphorothioate
  modified_base 2: mod_base = OTHER; note = 2'-O-methyladenosine-3'-phosphorothioate
  modified_base 3: mod_base = OTHER; note = 2'-deoxy-2'-fluorocytidine-3'-phosphate
  modified_base 4: mod_base = OTHER; note = 2'-O-methyladenosine-3'-phosphate
  modified_base 5: mod_base = OTHER; note = 2'-deoxy-2'-fluoroguanosine-3'-phosphate
  modified_base 6: mod_base = OTHER; note = 2'-O-methyluridine-3'-phosphate
  modified_base 7: mod_base = OTHER; note = 2'-deoxy-2'-fluoroguanosine-3'-phosphate
  modified_base 8: mod_base = OTHER; note = 2'-O-methyluridine-3'-phosphate
  modified_base 9: mod_base = OTHER; note = 2'-deoxy-2'-fluorouridine-3'-phosphate
  modified_base 10: mod_base = OTHER; note = 2'-deoxy-2'-fluorocytidine-3'-phosphate
  modified_base 11: mod_base = OTHER; note = 2'-deoxy-2'-fluorouridine-3'-phosphate
  modified_base 12: mod_base = OTHER; note = 2'-O-methyluridine-3'-phosphate
  modified_base 13: mod_base = OTHER; note = 2'-deoxy-2'-fluoroguanosine-3'-phosphate
  modified_base 14: mod_base = OTHER; note = 2'-O-methylcytidine-3'-phosphate
  modified_base 15: mod_base = OTHER; note = 2'-deoxy-2'-fluorouridine-3'-phosphate
  modified_base 16: mod_base = OTHER; note = 2'-O-methylcytidine-3'-phosphate
  modified_base 17: mod_base = OTHER; note = 2'-deoxy-2'-fluorouridine-3'-phosphate
  modified_base 18: mod_base = OTHER; note = 2'-O-methyladenosine-3'-phosphate
  modified_base 19: mod_base = OTHER; note = 2'-deoxy-2'-fluorouridine-3'-phosphate
  modified_base 20: mod_base = OTHER; note = 2'-O-methyladenosine-3'-phosphate
  modified_base 21: mod_base = OTHER; note = 4'-(R)-methyl-9-(alpha-L-threofuranosyl)adenine 2'-phosphate ((2S,4R)-1-[29-[[2-(acetylamino)-2-deoxy-beta-D-galactopyra nosyl]oxy]-14,14-bis[[3-[[3-[[5-[[2-(acetylamino)-2-deoxy-b eta-D-galactopyranosyl]oxy]-1-oxopentyl]amino]propyl]amino] -3-oxopropoxy]methyl]-1,12,19,25-tetraoxo-16-oxa-13,20,24-t riazanonacos-1-yl]-4-hydroxy-2-pyrrolidinyl)methyl ester
aacagtgttcttgctctataa

SEQ ID NO: 177 - RNA, 23 nt, synthetic construct
  source 1..23: mol_type = other RNA
  modified_base 1: mod_base = OTHER; note = 4'-(S)-methyl-1-(alpha-L-threofuranosyl)thymine 2'- phosphorothioate
  modified_base 2: mod_base = OTHER; note = 2'-deoxy-2'-fluorouridine-3'-phosphorothioate
  modified_base 3: mod_base = OTHER; note = 2'-O-methyladenosine-3'-phosphate
  modified_base 4: mod_base = OTHER; note = 2'-deoxy-2'-fluorouridine-3'-phosphate
  modified_base 5: mod_base = OTHER; note = 2'-O-methyladenosine-3'-phosphate
  modified_base 6: mod_base = OTHER; note = 2'-deoxy-2'-fluoroguanosine-3'-phosphate
  modified_base 7: mod_base = OTHER; note = 2'-O-methyladenosine-3'-phosphate
  modified_base 8: mod_base = OTHER; note = 2'-deoxy-2'-fluoroguanosine-3'-phosphate
  modified_base 9: mod_base = OTHER; note = 2'-O-methylcytidine-3'-phosphate
  modified_base 10: mod_base = OTHER; note = 2'-deoxy-2'-fluoroadenosine-3'-phosphate
  modified_base 11: mod_base = OTHER; note = 2'-O-methyladenosine-3'-phosphate
  modified_base 12: mod_base = OTHER; note = 2'-O-methylguanosine-3'-phosphate
  modified_base 13: mod_base = OTHER; note = 2'-O-methyladenosine-3'-phosphate
  modified_base 14: mod_base = OTHER; note = 2'-deoxy-2'-fluoroadenosine-3'-phosphate
  modified_base 15: mod_base = OTHER; note = 2'-O-methylcytidine-3'-phosphate
  modified_base 16: mod_base = OTHER; note = 2'-deoxy-2'-fluoroadenosine-3'-phosphate
  modified_base 17: mod_base = OTHER; note = 2'-O-methylcytidine-3'-phosphate
  modified_base 18: mod_base = OTHER; note = 2'-deoxy-2'-fluorouridine-3'-phosphate
  modified_base 19: mod_base = OTHER; note = 2'-O-methylguanosine-3'-phosphate
  modified_base 20: mod_base = OTHER; note = 2'-deoxy-2'-fluorouridine-3'-phosphate
  modified_base 21: mod_base = OTHER; note = 2'-O-methyluridine-3'-phosphorothioate
  modified_base 22: mod_base = OTHER; note = 2'-O-methyluridine-3'-phosphorothioate
  modified_base 23: mod_base = OTHER; note = 2'-O-methyluridine
ttatagagcaagaacactgtttt

SEQ ID NO: 178 - RNA, 23 nt, synthetic construct
  source 1..23: mol_type = other RNA
  modified_base 1: mod_base = OTHER; note = 2'-O-methyluridine-3'-phosphorothioate
  modified_base 2: mod_base = OTHER; note = 4'-(S)-methyl-1-(alpha-L-threofuranosyl)thymine 2'- phosphorothioate
  modified_base 3: mod_base = OTHER; note = 2'-O-methyladenosine-3'-phosphate
  modified_base 4: mod_base = OTHER; note = 2'-deoxy-2'-fluorouridine-3'-phosphate
  modified_base 5: mod_base = OTHER; note = 2'-O-methyladenosine-3'-phosphate
  modified_base 6: mod_base = OTHER; note = 2'-deoxy-2'-fluoroguanosine-3'-phosphate
  modified_base 7: mod_base = OTHER; note = 2'-O-methyladenosine-3'-phosphate
  modified_base 8: mod_base = OTHER; note = 2'-deoxy-2'-fluoroguanosine-3'-phosphate
  modified_base 9: mod_base = OTHER; note = 2'-O-methylcytidine-3'-phosphate
  modified_base 10: mod_base = OTHER; note = 2'-deoxy-2'-fluoroadenosine-3'-phosphate
  modified_base 11: mod_base = OTHER; note = 2'-O-methyladenosine-3'-phosphate
  modified_base 12: mod_base = OTHER; note = 2'-O-methylguanosine-3'-phosphate
  modified_base 13: mod_base = OTHER; note = 2'-O-methyladenosine-3'-phosphate
  modified_base 14: mod_base = OTHER; note = 2'-deoxy-2'-fluoroadenosine-3'-phosphate
  modified_base 15: mod_base = OTHER; note = 2'-O-methylcytidine-3'-phosphate
  modified_base 16: mod_base = OTHER; note = 2'-deoxy-2'-fluoroadenosine-3'-phosphate
  modified_base 17: mod_base = OTHER; note = 2'-O-methylcytidine-3'-phosphate
  modified_base 18: mod_base = OTHER; note = 2'-deoxy-2'-fluorouridine-3'-phosphate
  modified_base 19: mod_base = OTHER; note = 2'-O-methylguanosine-3'-phosphate
  modified_base 20: mod_base = OTHER; note = 2'-deoxy-2'-fluorouridine-3'-phosphate
  modified_base 21: mod_base = OTHER; note = 2'-O-methyluridine-3'-phosphorothioate
  modified_base 22: mod_base = OTHER; note = 2'-O-methyluridine-3'-phosphorothioate
  modified_base 23: mod_base = OTHER; note = 2'-O-methyluridine
ttatagagcaagaacactgtttt

SEQ ID NO: 179 - RNA, 23 nt, synthetic construct
  source 1..23: mol_type = other RNA
  modified_base 1: mod_base = OTHER; note = 2'-O-methyluridine-3'-phosphorothioate
  modified_base 2: mod_base = OTHER; note = 2'-deoxy-2'-fluorouridine-3'-phosphorothioate
  modified_base 3: mod_base = OTHER; note = 4'-(S)-methyl-9-(alpha-L-threofuranosyl)adenine 2'-phosphate
  modified_base 4: mod_base = OTHER; note = 2'-deoxy-2'-fluorouridine-3'-phosphate
  modified_base 5: mod_base = OTHER; note = 2'-O-methyladenosine-3'-phosphate
  modified_base 6: mod_base = OTHER; note = 2'-deoxy-2'-fluoroguanosine-3'-phosphate
  modified_base 7: mod_base = OTHER; note = 2'-O-methyladenosine-3'-phosphate
  modified_base 8: mod_base = OTHER; note = 2'-deoxy-2'-fluoroguanosine-3'-phosphate
  modified_base 9: mod_base = OTHER; note = 2'-O-methylcytidine-3'-phosphate
  modified_base 10: mod_base = OTHER; note = 2'-deoxy-2'-fluoroadenosine-3'-phosphate
  modified_base 11: mod_base = OTHER; note = 2'-O-methyladenosine-3'-phosphate
  modified_base 12: mod_base = OTHER; note = 2'-O-methylguanosine-3'-phosphate
  modified_base 13: mod_base = OTHER; note = 2'-O-methyladenosine-3'-phosphate
  modified_base 14: mod_base = OTHER; note = 2'-deoxy-2'-fluoroadenosine-3'-phosphate
  modified_base 15: mod_base = OTHER; note = 2'-O-methylcytidine-3'-phosphate
  modified_base 16: mod_base = OTHER; note = 2'-deoxy-2'-fluoroadenosine-3'-phosphate
  modified_base 17: mod_base = OTHER; note = 2'-O-methylcytidine-3'-phosphate
  modified_base 18: mod_base = OTHER; note = 2'-deoxy-2'-fluorouridine-3'-phosphate
  modified_base 19: mod_base = OTHER; note = 2'-O-methylguanosine-3'-phosphate
  modified_base 20: mod_base = OTHER; note = 2'-deoxy-2'-fluorouridine-3'-phosphate
  modified_base 21: mod_base = OTHER; note = 2'-O-methyluridine-3'-phosphorothioate
  modified_base 22: mod_base = OTHER; note = 2'-O-methyluridine-3'-phosphorothioate
  modified_base 23: mod_base = OTHER; note = 2'-O-methyluridine
ttatagagcaagaacactgtttt

SEQ ID NO: 180 - RNA, 23 nt, synthetic construct
  source 1..23: mol_type = other RNA
  modified_base 1: mod_base = OTHER; note = 2'-O-methyluridine-3'-phosphorothioate
  modified_base 2: mod_base = OTHER; note = 2'-deoxy-2'-fluorouridine-3'-phosphorothioate
  modified_base 3: mod_base = OTHER; note = 2'-O-methyladenosine-3'-phosphate
  modified_base 4: mod_base = OTHER; note = 4'-(S)-methyl-1-(alpha-L-threofuranosyl)thymine 2'-phosphate
  modified_base 5: mod_base = OTHER; note = 2'-O-methyladenosine-3'-phosphate
  modified_base 6: mod_base = OTHER; note = 2'-deoxy-2'-fluoroguanosine-3'-phosphate
  modified_base 7: mod_base = OTHER; note = 2'-O-methyladenosine-3'-phosphate
  modified_base 8: mod_base = OTHER; note = 2'-deoxy-2'-fluoroguanosine-3'-phosphate
  modified_base 9: mod_base = OTHER; note = 2'-O-methylcytidine-3'-phosphate
  modified_base 10: mod_base = OTHER; note = 2'-deoxy-2'-fluoroadenosine-3'-phosphate
  modified_base 11: mod_base = OTHER; note = 2'-O-methyladenosine-3'-phosphate
  modified_base 12: mod_base = OTHER; note = 2'-O-methylguanosine-3'-phosphate
  modified_base 13: mod_base = OTHER; note = 2'-O-methyladenosine-3'-phosphate
  modified_base 14: mod_base = OTHER; note = 2'-deoxy-2'-fluoroadenosine-3'-phosphate
  modified_base 15: mod_base = OTHER; note = 2'-O-methylcytidine-3'-phosphate
  modified_base 16: mod_base = OTHER; note = 2'-deoxy-2'-fluoroadenosine-3'-phosphate
  modified_base 17: mod_base = OTHER; note = 2'-O-methylcytidine-3'-phosphate
  modified_base 18: mod_base = OTHER; note = 2'-deoxy-2'-fluorouridine-3'-phosphate
  modified_base 19: mod_base = OTHER; note = 2'-O-methylguanosine-3'-phosphate
  modified_base 20: mod_base = OTHER; note = 2'-deoxy-2'-fluorouridine-3'-phosphate
  modified_base 21: mod_base = OTHER; note = 2'-O-methyluridine-3'-phosphorothioate
  modified_base 22: mod_base = OTHER; note = 2'-O-methyluridine-3'-phosphorothioate
  modified_base 23: mod_base = OTHER; note = 2'-O-methyluridine
ttatagagcaagaacactgtttt

SEQ ID NO: 181 - RNA, 23 nt, synthetic construct
  source 1..23: mol_type = other RNA
  modified_base 1: mod_base = OTHER; note = 2'-O-methyluridine-3'-phosphorothioate
  modified_base 2: mod_base = OTHER; note = 2'-deoxy-2'-fluorouridine-3'-phosphorothioate
  modified_base 3: mod_base = OTHER; note = 2'-O-methyladenosine-3'-phosphate
  modified_base 4: mod_base = OTHER; note = 2'-deoxy-2'-fluorouridine-3'-phosphate
  modified_base 5: mod_base = OTHER; note = 4'-(S)-methyl-9-(alpha-L-threofuranosyl)adenine 2'-phosphate
  modified_base 6: mod_base = OTHER; note = 2'-deoxy-2'-fluoroguanosine-3'-phosphate
  modified_base 7: mod_base = OTHER; note = 2'-O-methyladenosine-3'-phosphate
  modified_base 8: mod_base = OTHER; note = 2'-deoxy-2'-fluoroguanosine-3'-phosphate
  modified_base 9: mod_base = OTHER; note = 2'-O-methylcytidine-3'-phosphate
  modified_base 10: mod_base = OTHER; note = 2'-deoxy-2'-fluoroadenosine-3'-phosphate
  modified_base 11: mod_base = OTHER; note = 2'-O-methyladenosine-3'-phosphate
  modified_base 12: mod_base = OTHER; note = 2'-O-methylguanosine-3'-phosphate
  modified_base 13: mod_base = OTHER; note = 2'-O-methyladenosine-3'-phosphate
  modified_base 14: mod_base = OTHER; note = 2'-deoxy-2'-fluoroadenosine-3'-phosphate
  modified_base 15: mod_base = OTHER; note = 2'-O-methylcytidine-3'-phosphate
  modified_base 16: mod_base = OTHER; note = 2'-deoxy-2'-fluoroadenosine-3'-phosphate
  modified_base 17: mod_base = OTHER; note = 2'-O-methylcytidine-3'-phosphate
  modified_base 18: mod_base = OTHER; note = 2'-deoxy-2'-fluorouridine-3'-phosphate
  modified_base 19: mod_base = OTHER; note = 2'-O-methylguanosine-3'-phosphate
  modified_base 20: mod_base = OTHER; note = 2'-deoxy-2'-fluorouridine-3'-phosphate
  modified_base 21: mod_base = OTHER; note = 2'-O-methyluridine-3'-phosphorothioate
  modified_base 22: mod_base = OTHER; note = 2'-O-methyluridine-3'-phosphorothioate
  modified_base 23: mod_base = OTHER; note = 2'-O-methyluridine
ttatagagcaagaacactgtttt

SEQ ID NO: 182 - RNA, 23 nt, synthetic construct
  source 1..23: mol_type = other RNA
  modified_base 1: mod_base = OTHER; note = 2'-O-methyluridine-3'-phosphorothioate
  modified_base 2: mod_base = OTHER; note = 2'-deoxy-2'-fluorouridine-3'-phosphorothioate
  modified_base 3: mod_base = OTHER; note = 2'-O-methyladenosine-3'-phosphate
  modified_base 4: mod_base = OTHER; note = 2'-deoxy-2'-fluorouridine-3'-phosphate
  modified_base 5: mod_base = OTHER; note = 2'-O-methyladenosine-3'-phosphate
  modified_base 6: mod_base = OTHER; note = 4'-(S)-methyl-9-(alpha-L-threofuranosyl)guanine 2'-phosphate
  modified_base 7: mod_base = OTHER; note = 2'-O-methyladenosine-3'-phosphate
  modified_base 8: mod_base = OTHER; note = 2'-deoxy-2'-fluoroguanosine-3'-phosphate
  modified_base 9: mod_base = OTHER; note = 2'-O-methylcytidine-3'-phosphate
  modified_base 10: mod_base = OTHER; note = 2'-deoxy-2'-fluoroadenosine-3'-phosphate
  modified_base 11: mod_base = OTHER; note = 2'-O-methyladenosine-3'-phosphate
  modified_base 12: mod_base = OTHER; note = 2'-O-methylguanosine-3'-phosphate
  modified_base 13: mod_base = OTHER; note = 2'-O-methyladenosine-3'-phosphate
  modified_base 14: mod_base = OTHER; note = 2'-deoxy-2'-fluoroadenosine-3'-phosphate
  modified_base 15: mod_base = OTHER; note = 2'-O-methylcytidine-3'-phosphate
  modified_base 16: mod_base = OTHER; note = 2'-deoxy-2'-fluoroadenosine-3'-phosphate
  modified_base 17: mod_base = OTHER; note = 2'-O-methylcytidine-3'-phosphate
  modified_base 18: mod_base = OTHER; note = 2'-deoxy-2'-fluorouridine-3'-phosphate
  modified_base 19: mod_base = OTHER; note = 2'-O-methylguanosine-3'-phosphate
  modified_base 20: mod_base = OTHER; note = 2'-deoxy-2'-fluorouridine-3'-phosphate
  modified_base 21: mod_base = OTHER; note = 2'-O-methyluridine-3'-phosphorothioate
  modified_base 22: mod_base = OTHER; note = 2'-O-methyluridine-3'-phosphorothioate
  modified_base 23: mod_base = OTHER; note = 2'-O-methyluridine
ttatagagcaagaacactgtttt

SEQ ID NO: 183 - RNA, 23 nt, synthetic construct
  source 1..23: mol_type = other RNA
  modified_base 1: mod_base = OTHER; note = 2'-O-methyluridine-3'-phosphorothioate
  modified_base 2: mod_base = OTHER; note = 2'-deoxy-2'-fluorouridine-3'-phosphorothioate
  modified_base 3: mod_base = OTHER; note = 2'-O-methyladenosine-3'-phosphate
  modified_base 4: mod_base = OTHER; note = 2'-deoxy-2'-fluorouridine-3'-phosphate
  modified_base 5: mod_base = OTHER; note = 2'-O-methyladenosine-3'-phosphate
  modified_base 6: mod_base = OTHER; note = 2'-deoxy-2'-fluoroguanosine-3'-phosphate
  modified_base 7: mod_base = OTHER; note = 4'-(S)-methyl-9-(alpha-L-threofuranosyl)adenine 2'-phosphate
  modified_base 8: mod_base = OTHER; note = 2'-deoxy-2'-fluoroguanosine-3'-phosphate
  modified_base 9: mod_base = OTHER; note = 2'-O-methylcytidine-3'-phosphate
  modified_base 10: mod_base = OTHER; note = 2'-deoxy-2'-fluoroadenosine-3'-phosphate
  modified_base 11: mod_base = OTHER; note = 2'-O-methyladenosine-3'-phosphate
  modified_base 12: mod_base = OTHER; note = 2'-O-methylguanosine-3'-phosphate
  modified_base 13: mod_base = OTHER; note = 2'-O-methyladenosine-3'-phosphate
  modified_base 14: mod_base = OTHER; note = 2'-deoxy-2'-fluoroadenosine-3'-phosphate
  modified_base 15: mod_base = OTHER; note = 2'-O-methylcytidine-3'-phosphate
  modified_base 16: mod_base = OTHER; note = 2'-deoxy-2'-fluoroadenosine-3'-phosphate
  modified_base 17: mod_base = OTHER; note = 2'-O-methylcytidine-3'-phosphate
  modified_base 18: mod_base = OTHER; note = 2'-deoxy-2'-fluorouridine-3'-phosphate
  modified_base 19: mod_base = OTHER; note = 2'-O-methylguanosine-3'-phosphate
  modified_base 20: mod_base = OTHER; note = 2'-deoxy-2'-fluorouridine-3'-phosphate
  modified_base 21: mod_base = OTHER; note = 2'-O-methyluridine-3'-phosphorothioate
  modified_base 22: mod_base = OTHER; note = 2'-O-methyluridine-3'-phosphorothioate
  modified_base 23: mod_base = OTHER; note = 2'-O-methyluridine
ttatagagcaagaacactgtttt

SEQ ID NO: 184 - RNA, 23 nt, synthetic construct
  source 1..23: mol_type = other RNA
  modified_base 1: mod_base = OTHER; note = 2'-O-methyluridine-3'-phosphorothioate
  modified_base 2: mod_base = OTHER; note = 2'-deoxy-2'-fluorouridine-3'-phosphorothioate
  modified_base 3: mod_base = OTHER; note = 2'-O-methyladenosine-3'-phosphate
  modified_base 4: mod_base = OTHER; note = 2'-deoxy-2'-fluorouridine-3'-phosphate
  modified_base 5: mod_base = OTHER; note = 2'-O-methyladenosine-3'-phosphate
  modified_base 6: mod_base = OTHER; note = 2'-deoxy-2'-fluoroguanosine-3'-phosphate
  modified_base 7: mod_base = OTHER; note = 2'-O-methyladenosine-3'-phosphate
  modified_base 8: mod_base = OTHER; note = 4'-(S)-methyl-9-(alpha-L-threofuranosyl)guanine 2'-phosphate
  modified_base 9: mod_base = OTHER; note = 2'-O-methylcytidine-3'-phosphate
  modified_base 10: mod_base = OTHER; note = 2'-deoxy-2'-fluoroadenosine-3'-phosphate
  modified_base 11: mod_base = OTHER; note = 2'-O-methyladenosine-3'-phosphate
  modified_base 12: mod_base = OTHER; note = 2'-O-methylguanosine-3'-phosphate
  modified_base 13: mod_base = OTHER; note = 2'-O-methyladenosine-3'-phosphate
  modified_base 14: mod_base = OTHER; note = 2'-deoxy-2'-fluoroadenosine-3'-phosphate
  modified_base 15: mod_base = OTHER; note = 2'-O-methylcytidine-3'-phosphate
  modified_base 16: mod_base = OTHER; note = 2'-deoxy-2'-fluoroadenosine-3'-phosphate
  modified_base 17: mod_base = OTHER; note = 2'-O-methylcytidine-3'-phosphate
  modified_base 18: mod_base = OTHER; note = 2'-deoxy-2'-fluorouridine-3'-phosphate
  modified_base 19: mod_base = OTHER; note = 2'-O-methylguanosine-3'-phosphate
  modified_base 20: mod_base = OTHER; note = 2'-deoxy-2'-fluorouridine-3'-phosphate
  modified_base 21: mod_base = OTHER; note = 2'-O-methyluridine-3'-phosphorothioate
  modified_base 22: mod_base = OTHER; note = 2'-O-methyluridine-3'-phosphorothioate
  modified_base 23: mod_base = OTHER; note = 2'-O-methyluridine
ttatagagcaagaacactgtttt

SEQ ID NO: 185 - RNA, 23 nt, synthetic construct
  source 1..23: mol_type = other RNA
  modified_base 1: mod_base = OTHER; note = 2'-O-methyluridine-3'-phosphorothioate
  modified_base 2: mod_base = OTHER; note = 2'-deoxy-2'-fluorouridine-3'-phosphorothioate
  modified_base 3: mod_base = OTHER; note = 2'-O-methyladenosine-3'-phosphate
  modified_base 4: mod_base = OTHER; note = 2'-deoxy-2'-fluorouridine-3'-phosphate
  modified_base 5: mod_base = OTHER; note = 2'-O-methyladenosine-3'-phosphate
  modified_base 6: mod_base = OTHER; note = 2'-deoxy-2'-fluoroguanosine-3'-phosphate
  modified_base 7: mod_base = OTHER; note = 2'-O-methyladenosine-3'-phosphate
  modified_base 8: mod_base = OTHER; note = 2'-deoxy-2'-fluoroguanosine-3'-phosphate
  modified_base 9: mod_base = OTHER; note = 4'-(S)-methyl-1-(alpha-L-threofuranosyl)cytosine 2'-phosphate
  modified_base 10: mod_base = OTHER; note = 2'-deoxy-2'-fluoroadenosine-3'-phosphate
  modified_base 11: mod_base = OTHER; note = 2'-O-methyladenosine-3'-phosphate
  modified_base 12: mod_base = OTHER; note = 2'-O-methylguanosine-3'-phosphate
  modified_base 13: mod_base = OTHER; note = 2'-O-methyladenosine-3'-phosphate
  modified_base 14: mod_base = OTHER; note = 2'-deoxy-2'-fluoroadenosine-3'-phosphate
  modified_base 15: mod_base = OTHER; note = 2'-O-methylcytidine-3'-phosphate
  modified_base 16: mod_base = OTHER; note = 2'-deoxy-2'-fluoroadenosine-3'-phosphate
  modified_base 17: mod_base = OTHER; note = 2'-O-methylcytidine-3'-phosphate
  modified_base 18: mod_base = OTHER; note = 2'-deoxy-2'-fluorouridine-3'-phosphate
  modified_base 19: mod_base = OTHER; note = 2'-O-methylguanosine-3'-phosphate
  modified_base 20: mod_base = OTHER; note = 2'-deoxy-2'-fluorouridine-3'-phosphate
  modified_base 21: mod_base = OTHER; note = 2'-O-methyluridine-3'-phosphorothioate
  modified_base 22: mod_base = OTHER; note = 2'-O-methyluridine-3'-phosphorothioate
  modified_base 23: mod_base = OTHER; note = 2'-O-methyluridine
ttatagagcaagaacactgtttt

SEQ ID NO: 186 - RNA, 23 nt, synthetic construct
  source 1..23: mol_type = other RNA
  modified_base 1: mod_base = OTHER; note = 2'-O-methyluridine-3'-phosphorothioate
  modified_base 2: mod_base = OTHER; note = 2'-deoxy-2'-fluorouridine-3'-phosphorothioate
  modified_base 3: mod_base = OTHER; note = 2'-O-methyladenosine-3'-phosphate
  modified_base 4: mod_base = OTHER; note = 2'-deoxy-2'-fluorouridine-3'-phosphate
  modified_base 5: mod_base = OTHER; note = 2'-O-methyladenosine-3'-phosphate
  modified_base 6: mod_base = OTHER; note = 2'-deoxy-2'-fluoroguanosine-3'-phosphate
  modified_base 7: mod_base = OTHER; note = 2'-O-methyladenosine-3'-phosphate
  modified_base 8: mod_base = OTHER; note = 2'-deoxy-2'-fluoroguanosine-3'-phosphate
  modified_base 9: mod_base = OTHER; note = 2'-O-methylcytidine-3'-phosphate
  modified_base 10: mod_base = OTHER; note = 4'-(S)-methyl-9-(alpha-L-threofuranosyl)adenine 2'-phosphate
  modified_base 11: mod_base = OTHER; note = 2'-O-methyladenosine-3'-phosphate
  modified_base 12: mod_base = OTHER; note = 2'-O-methylguanosine-3'-phosphate
  modified_base 13: mod_base = OTHER; note = 2'-O-methyladenosine-3'-phosphate
  modified_base 14: mod_base = OTHER; note = 2'-deoxy-2'-fluoroadenosine-3'-phosphate
  modified_base 15: mod_base = OTHER; note = 2'-O-methylcytidine-3'-phosphate
  modified_base 16: mod_base = OTHER; note = 2'-deoxy-2'-fluoroadenosine-3'-phosphate
  modified_base 17: mod_base = OTHER; note = 2'-O-methylcytidine-3'-phosphate
  modified_base 18: mod_base = OTHER; note = 2'-deoxy-2'-fluorouridine-3'-phosphate
  modified_base 19: mod_base = OTHER; note = 2'-O-methylguanosine-3'-phosphate
  modified_base 20: mod_base = OTHER; note = 2'-deoxy-2'-fluorouridine-3'-phosphate
  modified_base 21: mod_base = OTHER; note = 2'-O-methyluridine-3'-phosphorothioate
  modified_base 22: mod_base = OTHER; note = 2'-O-methyluridine-3'-phosphorothioate
  modified_base 23: mod_base = OTHER; note = 2'-O-methyluridine
ttatagagcaagaacactgtttt

SEQ ID NO: 187 - RNA, 23 nt, synthetic construct
  source 1..23: mol_type = other RNA
  modified_base 1: mod_base = OTHER; note = 2'-O-methyluridine-3'-phosphorothioate
  modified_base 2: mod_base = OTHER; note = 2'-deoxy-2'-fluorouridine-3'-phosphorothioate
  modified_base 3: mod_base = OTHER; note = 2'-O-methyladenosine-3'-phosphate
  modified_base 4: mod_base = OTHER; note = 2'-deoxy-2'-fluorouridine-3'-phosphate
  modified_base 5: mod_base = OTHER; note = 2'-O-methyladenosine-3'-phosphate
  modified_base 6: mod_base = OTHER; note = 2'-deoxy-2'-fluoroguanosine-3'-phosphate
  modified_base 7: mod_base = OTHER; note = 2'-O-methyladenosine-3'-phosphate
  modified_base 8: mod_base = OTHER; note = 2'-deoxy-2'-fluoroguanosine-3'-phosphate
  modified_base 9: mod_base = OTHER; note = 2'-O-methylcytidine-3'-phosphate
  modified_base 10: mod_base = OTHER; note = 2'-deoxy-2'-fluoroadenosine-3'-phosphate
  modified_base 11: mod_base = OTHER; note = 4'-(S)-methyl-9-(alpha-L-threofuranosyl)adenine 2'-phosphate
  modified_base 12: mod_base = OTHER; note = 2'-O-methylguanosine-3'-phosphate
  modified_base 13: mod_base = OTHER; note = 2'-O-methyladenosine-3'-phosphate
  modified_base 14: mod_base = OTHER; note = 2'-deoxy-2'-fluoroadenosine-3'-phosphate
  modified_base 15: mod_base = OTHER; note = 2'-O-methylcytidine-3'-phosphate
  modified_base 16: mod_base = OTHER; note = 2'-deoxy-2'-fluoroadenosine-3'-phosphate
  modified_base 17: mod_base = OTHER; note = 2'-O-methylcytidine-3'-phosphate
  modified_base 18: mod_base = OTHER; note = 2'-deoxy-2'-fluorouridine-3'-phosphate
  modified_base 19: mod_base = OTHER; note = 2'-O-methylguanosine-3'-phosphate
  modified_base 20: mod_base = OTHER; note = 2'-deoxy-2'-fluorouridine-3'-phosphate
  modified_base 21: mod_base = OTHER; note = 2'-O-methyluridine-3'-phosphorothioate
  modified_base 22: mod_base = OTHER; note = 2'-O-methyluridine-3'-phosphorothioate
  modified_base 23: mod_base = OTHER; note = 2'-O-methyluridine
ttatagagcaagaacactgtttt

SEQ ID NO: 188 - RNA, 23 nt, synthetic construct
  source 1..23: mol_type = other RNA
  modified_base 1: mod_base = OTHER; note = 2'-O-methyluridine-3'-phosphorothioate
  modified_base 2: mod_base = OTHER; note = 2'-deoxy-2'-fluorouridine-3'-phosphorothioate
  modified_base 3: mod_base = OTHER; note = 2'-O-methyladenosine-3'-phosphate
  modified_base 4: mod_base = OTHER; note = 2'-deoxy-2'-fluorouridine-3'-phosphate
  modified_base 5: mod_base = OTHER; note = 2'-O-methyladenosine-3'-phosphate
  modified_base 6: mod_base = OTHER; note = 2'-deoxy-2'-fluoroguanosine-3'-phosphate
  modified_base 7: mod_base = OTHER; note = 2'-O-methyladenosine-3'-phosphate
  modified_base 8: mod_base = OTHER; note = 2'-deoxy-2'-fluoroguanosine-3'-phosphate
  modified_base 9: mod_base = OTHER; note = 2'-O-methylcytidine-3'-phosphate
  modified_base 10: mod_base = OTHER; note = 2'-deoxy-2'-fluoroadenosine-3'-phosphate
  modified_base 11: mod_base = OTHER; note = 2'-O-methyladenosine-3'-phosphate
  modified_base 12: mod_base = OTHER; note = 4'-(S)-methyl-9-(alpha-L-threofuranosyl)guanine 2'-phosphate
  modified_base 13: mod_base = OTHER; note = 2'-O-methyladenosine-3'-phosphate
  modified_base 14: mod_base = OTHER; note = 2'-deoxy-2'-fluoroadenosine-3'-phosphate
  modified_base 15: mod_base = OTHER; note = 2'-O-methylcytidine-3'-phosphate
  modified_base 16: mod_base = OTHER; note = 2'-deoxy-2'-fluoroadenosine-3'-phosphate
  modified_base 17: mod_base = OTHER; note = 2'-O-methylcytidine-3'-phosphate
  modified_base 18: mod_base = OTHER; note = 2'-deoxy-2'-fluorouridine-3'-phosphate
  modified_base 19: mod_base = OTHER; note = 2'-O-methylguanosine-3'-phosphate
  modified_base 20: mod_base = OTHER; note = 2'-deoxy-2'-fluorouridine-3'-phosphate
  modified_base 21: mod_base = OTHER; note = 2'-O-methyluridine-3'-phosphorothioate
  modified_base 22: mod_base = OTHER; note = 2'-O-methyluridine-3'-phosphorothioate
  modified_base 23: mod_base = OTHER; note = 2'-O-methyluridine
ttatagagcaagaacactgtttt

SEQ ID NO: 189 - RNA, 23 nt, synthetic construct
  source 1..23: mol_type = other RNA
  modified_base 1: mod_base = OTHER; note = 2'-O-methyluridine-3'-phosphorothioate
  modified_base 2: mod_base = OTHER; note = 2'-deoxy-2'-fluorouridine-3'-phosphorothioate
  modified_base 3: mod_base = OTHER; note = 2'-O-methyladenosine-3'-phosphate
  modified_base 4: mod_base = OTHER; note = 2'-deoxy-2'-fluorouridine-3'-phosphate
  modified_base 5: mod_base = OTHER; note = 2'-O-methyladenosine-3'-phosphate
  modified_base 6: mod_base = OTHER; note = 2'-deoxy-2'-fluoroguanosine-3'-phosphate
  modified_base 7: mod_base = OTHER; note = 2'-O-methyladenosine-3'-phosphate
  modified_base 8: mod_base = OTHER; note = 2'-deoxy-2'-fluoroguanosine-3'-phosphate
  modified_base 9: mod_base = OTHER; note = 2'-O-methylcytidine-3'-phosphate
  modified_base 10: mod_base = OTHER; note = 2'-deoxy-2'-fluoroadenosine-3'-phosphate
  modified_base 11: mod_base = OTHER; note = 2'-O-methyladenosine-3'-phosphate
  modified_base 12: mod_base = OTHER; note = 2'-O-methylguanosine-3'-phosphate
  modified_base 13: mod_base = OTHER; note = 4'-(S)-methyl-9-(alpha-L-threofuranosyl)adenine 2'-phosphate
  modified_base 14: mod_base = OTHER; note = 2'-deoxy-2'-fluoroadenosine-3'-phosphate
  modified_base 15: mod_base = OTHER; note = 2'-O-methylcytidine-3'-phosphate
  modified_base 16: mod_base = OTHER; note = 2'-deoxy-2'-fluoroadenosine-3'-phosphate
  modified_base 17: mod_base = OTHER; note = 2'-O-methylcytidine-3'-phosphate
  modified_base 18: mod_base = OTHER; note = 2'-deoxy-2'-fluorouridine-3'-phosphate
  modified_base 19: mod_base = OTHER; note = 2'-O-methylguanosine-3'-phosphate
  modified_base 20: mod_base = OTHER; note = 2'-deoxy-2'-fluorouridine-3'-phosphate
  modified_base 21: mod_base = OTHER; note = 2'-O-methyluridine-3'-phosphorothioate
  modified_base 22: mod_base = OTHER; note = 2'-O-methyluridine-3'-phosphorothioate
  modified_base 23: mod_base = OTHER; note = 2'-O-methyluridine
ttatagagcaagaacactgtttt

SEQ ID NO: 190 - RNA, 23 nt, synthetic construct
  source 1..23: mol_type = other RNA
  modified_base 1: mod_base = OTHER; note = 2'-O-methyluridine-3'-phosphorothioate
  modified_base 2: mod_base = OTHER; note = 2'-deoxy-2'-fluorouridine-3'-phosphorothioate
  modified_base 3: mod_base = OTHER; note = 2'-O-methyladenosine-3'-phosphate
  modified_base 4: mod_base = OTHER; note = 2'-deoxy-2'-fluorouridine-3'-phosphate
  modified_base 5: mod_base = OTHER; note = 2'-O-methyladenosine-3'-phosphate
  modified_base 6: mod_base = OTHER; note = 2'-deoxy-2'-fluoroguanosine-3'-phosphate
  modified_base 7: mod_base = OTHER; note = 2'-O-methyladenosine-3'-phosphate
  modified_base 8: mod_base = OTHER; note = 2'-deoxy-2'-fluoroguanosine-3'-phosphate
  modified_base 9: mod_base = OTHER; note = 2'-O-methylcytidine-3'-phosphate
  modified_base 10: mod_base = OTHER; note = 2'-deoxy-2'-fluoroadenosine-3'-phosphate
  modified_base 11: mod_base = OTHER; note = 2'-O-methyladenosine-3'-phosphate
  modified_base 12: mod_base = OTHER; note = 2'-O-methylguanosine-3'-phosphate
  modified_base 13: mod_base = OTHER; note = 2'-O-methyladenosine-3'-phosphate
  modified_base 14: mod_base = OTHER; note = 4'-(S)-methyl-9-(alpha-L-threofuranosyl)adenine 2'-phosphate
  modified_base 15: mod_base = OTHER; note = 2'-O-methylcytidine-3'-phosphate
  modified_base 16: mod_base = OTHER; note = 2'-deoxy-2'-fluoroadenosine-3'-phosphate
  modified_base 17: mod_base = OTHER; note = 2'-O-methylcytidine-3'-phosphate
  modified_base 18: mod_base = OTHER; note = 2'-deoxy-2'-fluorouridine-3'-phosphate
  modified_base 19: mod_base = OTHER; note = 2'-O-methylguanosine-3'-phosphate
  modified_base 20: mod_base = OTHER; note = 2'-deoxy-2'-fluorouridine-3'-phosphate
  modified_base 21: mod_base = OTHER; note = 2'-O-methyluridine-3'-phosphorothioate
  modified_base 22: mod_base = OTHER; note = 2'-O-methyluridine-3'-phosphorothioate
  modified_base 23: mod_base = OTHER; note = 2'-O-methyluridine
ttatagagcaagaacactgtttt

SEQ ID NO: 191 - RNA, 23 nt, synthetic construct
  source 1..23: mol_type = other RNA
  modified_base 1: mod_base = OTHER; note = 2'-O-methyluridine-3'-phosphorothioate
  modified_base 2: mod_base = OTHER; note = 2'-deoxy-2'-fluorouridine-3'-phosphorothioate
  modified_base 3: mod_base = OTHER; note = 2'-O-methyladenosine-3'-phosphate
  modified_base 4: mod_base = OTHER; note = 2'-deoxy-2'-fluorouridine-3'-phosphate
  modified_base 5: mod_base = OTHER; note = 2'-O-methyladenosine-3'-phosphate
  modified_base 6: mod_base = OTHER; note = 2'-deoxy-2'-fluoroguanosine-3'-phosphate
  modified_base 7: mod_base = OTHER; note = 2'-O-methyladenosine-3'-phosphate
  modified_base 8: mod_base = OTHER; note = 2'-deoxy-2'-fluoroguanosine-3'-phosphate
  modified_base 9: mod_base = OTHER; note = 2'-O-methylcytidine-3'-phosphate
  modified_base 10: mod_base = OTHER; note = 2'-deoxy-2'-fluoroadenosine-3'-phosphate
  modified_base 11: mod_base = OTHER; note = 2'-O-methyladenosine-3'-phosphate
  modified_base 12: mod_base = OTHER; note = 2'-O-methylguanosine-3'-phosphate
  modified_base 13: mod_base = OTHER; note = 2'-O-methyladenosine-3'-phosphate
  modified_base 14: mod_base = OTHER; note = 2'-deoxy-2'-fluoroadenosine-3'-phosphate
  modified_base 15: mod_base = OTHER; note = 4'-(S)-methyl-1-(alpha-L-threofuranosyl)cytosine 2'-phosphate
  modified_base 16: mod_base = OTHER; note = 2'-deoxy-2'-fluoroadenosine-3'-phosphate
  modified_base 17: mod_base = OTHER; note = 2'-O-methylcytidine-3'-phosphate
  modified_base 18: mod_base = OTHER; note = 2'-deoxy-2'-fluorouridine-3'-phosphate
  modified_base 19: mod_base = OTHER; note = 2'-O-methylguanosine-3'-phosphate
  modified_base 20: mod_base = OTHER; note = 2'-deoxy-2'-fluorouridine-3'-phosphate
  modified_base 21: mod_base = OTHER; note = 2'-O-methyluridine-3'-phosphorothioate
  modified_base 22: mod_base = OTHER; note = 2'-O-methyluridine-3'-phosphorothioate
  modified_base 23: mod_base = OTHER; note = 2'-O-methyluridine
ttatagagcaagaacactgtttt

SEQ ID NO: 192 - RNA, 23 nt, synthetic construct
  source 1..23: mol_type = other RNA
  modified_base 1: mod_base = OTHER; note = 2'-O-methyluridine-3'-phosphorothioate
  modified_base 2: mod_base = OTHER; note = 2'-deoxy-2'-fluorouridine-3'-phosphorothioate
  modified_base 3: mod_base = OTHER; note = 2'-O-methyladenosine-3'-phosphate
  modified_base 4: mod_base = OTHER; note = 2'-deoxy-2'-fluorouridine-3'-phosphate
  modified_base 5: mod_base = OTHER; note = 2'-O-methyladenosine-3'-phosphate
  modified_base 6: mod_base = OTHER; note = 2'-deoxy-2'-fluoroguanosine-3'-phosphate
  modified_base 7: mod_base = OTHER; note = 2'-O-methyladenosine-3'-phosphate
  modified_base 8: mod_base = OTHER; note = 2'-deoxy-2'-fluoroguanosine-3'-phosphate
  modified_base 9: mod_base = OTHER; note = 2'-O-methylcytidine-3'-phosphate
  modified_base 10: mod_base = OTHER; note = 2'-deoxy-2'-fluoroadenosine-3'-phosphate
  modified_base 11: mod_base = OTHER; note = 2'-O-methyladenosine-3'-phosphate
  modified_base 12: mod_base = OTHER; note = 2'-O-methylguanosine-3'-phosphate
  modified_base 13: mod_base = OTHER; note = 2'-O-methyladenosine-3'-phosphate
  modified_base 14: mod_base = OTHER; note = 2'-deoxy-2'-fluoroadenosine-3'-phosphate
  modified_base 15: mod_base = OTHER; note = 2'-O-methylcytidine-3'-phosphate
  modified_base 16: mod_base = OTHER; note = 4'-(S)-methyl-9-(alpha-L-threofuranosyl)adenine 2'-phosphate
  modified_base 17: mod_base = OTHER; note = 2'-O-methylcytidine-3'-phosphate
  modified_base 18: mod_base = OTHER; note = 2'-deoxy-2'-fluorouridine-3'-phosphate
  modified_base 19: mod_base = OTHER; note = 2'-O-methylguanosine-3'-phosphate
  modified_base 20: mod_base = OTHER; note = 2'-deoxy-2'-fluorouridine-3'-phosphate
  modified_base 21: mod_base = OTHER; note = 2'-O-methyluridine-3'-phosphorothioate
  modified_base 22: mod_base = OTHER; note = 2'-O-methyluridine-3'-phosphorothioate
  modified_base 23: mod_base = OTHER; note = 2'-O-methyluridine
ttatagagcaagaacactgtttt

SEQ ID NO: 193 - RNA, 23 nt, synthetic construct
  source 1..23: mol_type = other RNA
  modified_base 1: mod_base = OTHER; note = 2'-O-methyluridine-3'-phosphorothioate
  modified_base 2: mod_base = OTHER; note = 2'-deoxy-2'-fluorouridine-3'-phosphorothioate
  modified_base 3: mod_base = OTHER; note = 2'-O-methyladenosine-3'-phosphate
  modified_base 4: mod_base = OTHER; note = 2'-deoxy-2'-fluorouridine-3'-phosphate
  modified_base 5: mod_base = OTHER; note = 2'-O-methyladenosine-3'-phosphate
  modified_base 6: mod_base = OTHER; note = 2'-deoxy-2'-fluoroguanosine-3'-phosphate
  modified_base 7: mod_base = OTHER; note = 2'-O-methyladenosine-3'-phosphate
  modified_base 8: mod_base = OTHER; note = 2'-deoxy-2'-fluoroguanosine-3'-phosphate
  modified_base 9: mod_base = OTHER; note = 2'-O-methylcytidine-3'-phosphate
  modified_base 10: mod_base = OTHER; note = 2'-deoxy-2'-fluoroadenosine-3'-phosphate
  modified_base 11: mod_base = OTHER; note = 2'-O-methyladenosine-3'-phosphate
  modified_base 12: mod_base = OTHER; note = 2'-O-methylguanosine-3'-phosphate
  modified_base 13: mod_base = OTHER; note = 2'-O-methyladenosine-3'-phosphate
  modified_base 14: mod_base = OTHER; note = 2'-deoxy-2'-fluoroadenosine-3'-phosphate
  modified_base 15: mod_base = OTHER; note = 2'-O-methylcytidine-3'-phosphate
  modified_base 16: mod_base = OTHER; note = 2'-deoxy-2'-fluoroadenosine-3'-phosphate
  modified_base 17: mod_base = OTHER; note = 4'-(S)-methyl-1-(alpha-L-threofuranosyl)cytosine 2'-phosphate
  modified_base 18: mod_base = OTHER; note = 2'-deoxy-2'-fluorouridine-3'-phosphate
  modified_base 19: mod_base = OTHER; note = 2'-O-methylguanosine-3'-phosphate
  modified_base 20: mod_base = OTHER; note = 2'-deoxy-2'-fluorouridine-3'-phosphate
  modified_base 21: mod_base = OTHER; note = 2'-O-methyluridine-3'-phosphorothioate
  modified_base 22: mod_base = OTHER; note = 2'-O-methyluridine-3'-phosphorothioate
  modified_base 23: mod_base = OTHER; note = 2'-O-methyluridine
ttatagagcaagaacactgtttt

SEQ ID NO: 194 - RNA, 23 nt, synthetic construct
  source 1..23: mol_type = other RNA
  modified_base 1: mod_base = OTHER; note = 2'-O-methyluridine-3'-phosphorothioate
  modified_base 2: mod_base = OTHER; note = 2'-deoxy-2'-fluorouridine-3'-phosphorothioate
  modified_base 3: mod_base = OTHER; note = 2'-O-methyladenosine-3'-phosphate
  modified_base 4: mod_base = OTHER; note = 2'-deoxy-2'-fluorouridine-3'-phosphate
  modified_base 5: mod_base = OTHER; note = 2'-O-methyladenosine-3'-phosphate
  modified_base 6: mod_base = OTHER; note = 2'-deoxy-2'-fluoroguanosine-3'-phosphate
  modified_base 7: mod_base = OTHER; note = 2'-O-methyladenosine-3'-phosphate
  modified_base 8: mod_base = OTHER; note = 2'-deoxy-2'-fluoroguanosine-3'-phosphate
  modified_base 9: mod_base = OTHER; note = 2'-O-methylcytidine-3'-phosphate
  modified_base 10: mod_base = OTHER; note = 2'-deoxy-2'-fluoroadenosine-3'-phosphate
  modified_base 11: mod_base = OTHER; note = 2'-O-methyladenosine-3'-phosphate
  modified_base 12: mod_base = OTHER; note = 2'-O-methylguanosine-3'-phosphate
  modified_base 13: mod_base = OTHER; note = 2'-O-methyladenosine-3'-phosphate
  modified_base 14: mod_base = OTHER; note = 2'-deoxy-2'-fluoroadenosine-3'-phosphate
  modified_base 15: mod_base = OTHER; note = 2'-O-methylcytidine-3'-phosphate
  modified_base 16: mod_base = OTHER; note = 2'-deoxy-2'-fluoroadenosine-3'-phosphate
  modified_base 17: mod_base = OTHER; note = 2'-O-methylcytidine-3'-phosphate
  modified_base 18: mod_base = OTHER; note = 4'-(S)-methyl-1-(alpha-L-threofuranosyl)thymine 2'-phosphate
  modified_base 19: mod_base = OTHER; note = 2'-O-methylguanosine-3'-phosphate
  modified_base 20: mod_base = OTHER; note = 2'-deoxy-2'-fluorouridine-3'-phosphate
  modified_base 21: mod_base = OTHER; note = 2'-O-methyluridine-3'-phosphorothioate
  modified_base 22: mod_base = OTHER; note = 2'-O-methyluridine-3'-phosphorothioate
  modified_base 23: mod_base = OTHER; note = 2'-O-methyluridine
ttatagagcaagaacactgtttt

SEQ ID NO: 195 - RNA, 23 nt, synthetic construct
  source 1..23: mol_type = other RNA
  modified_base 1: mod_base = OTHER; note = 2'-O-methyluridine-3'-phosphorothioate
  modified_base 2: mod_base = OTHER; note = 2'-deoxy-2'-fluorouridine-3'-phosphorothioate
  modified_base 3: mod_base = OTHER; note = 2'-O-methyladenosine-3'-phosphate
  modified_base 4: mod_base = OTHER; note = 2'-deoxy-2'-fluorouridine-3'-phosphate
  modified_base 5: mod_base = OTHER; note = 2'-O-methyladenosine-3'-phosphate
  modified_base 6: mod_base = OTHER; note = 2'-deoxy-2'-fluoroguanosine-3'-phosphate
  modified_base 7: mod_base = OTHER; note = 2'-O-methyladenosine-3'-phosphate
  modified_base 8: mod_base = OTHER; note = 2'-deoxy-2'-fluoroguanosine-3'-phosphate
  modified_base 9: mod_base = OTHER; note = 2'-O-methylcytidine-3'-phosphate
  modified_base 10: mod_base = OTHER; note = 2'-deoxy-2'-fluoroadenosine-3'-phosphate
  modified_base 11: mod_base = OTHER; note = 2'-O-methyladenosine-3'-phosphate
  modified_base 12: mod_base = OTHER; note = 2'-O-methylguanosine-3'-phosphate
  modified_base 13: mod_base = OTHER; note = 2'-O-methyladenosine-3'-phosphate
  modified_base 14: mod_base = OTHER; note = 2'-deoxy-2'-fluoroadenosine-3'-phosphate
  modified_base 15: mod_base = OTHER; note = 2'-O-methylcytidine-3'-phosphate
  modified_base 16: mod_base = OTHER; note = 2'-deoxy-2'-fluoroadenosine-3'-phosphate
  modified_base 17: mod_base = OTHER; note = 2'-O-methylcytidine-3'-phosphate
  modified_base 18: mod_base = OTHER; note = 2'-deoxy-2'-fluorouridine-3'-phosphate
  modified_base 19: mod_base = OTHER; note = 4'-(S)-methyl-9-(alpha-L-threofuranosyl)guanine 2'-phosphate
  modified_base 20: mod_base = OTHER; note = 2'-deoxy-2'-fluorouridine-3'-phosphate
  modified_base 21: mod_base = OTHER; note = 2'-O-methyluridine-3'-phosphorothioate
  modified_base 22: mod_base = OTHER; note = 2'-O-methyluridine-3'-phosphorothioate
  modified_base 23: mod_base = OTHER; note = 2'-O-methyluridine
ttatagagcaagaacactgtttt

SEQ ID NO: 196 - RNA, 23 nt, synthetic construct
  source 1..23: mol_type = other RNA
  modified_base 1: mod_base = OTHER; note = 2'-O-methyluridine-3'-phosphorothioate
  modified_base 2: mod_base = OTHER; note = 2'-deoxy-2'-fluorouridine-3'-phosphorothioate
  modified_base 3: mod_base = OTHER; note = 2'-O-methyladenosine-3'-phosphate
  modified_base 4: mod_base = OTHER; note = 2'-deoxy-2'-fluorouridine-3'-phosphate
  modified_base 5: mod_base = OTHER; note = 2'-O-methyladenosine-3'-phosphate
  modified_base 6: mod_base = OTHER; note = 2'-deoxy-2'-fluoroguanosine-3'-phosphate
  modified_base 7: mod_base = OTHER; note = 2'-O-methyladenosine-3'-phosphate
  modified_base 8: mod_base = OTHER; note = 2'-deoxy-2'-fluoroguanosine-3'-phosphate
  modified_base 9: mod_base = OTHER; note = 2'-O-methylcytidine-3'-phosphate
  modified_base 10: mod_base = OTHER; note = 2'-deoxy-2'-fluoroadenosine-3'-phosphate
  modified_base 11: mod_base = OTHER; note = 2'-O-methyladenosine-3'-phosphate
  modified_base 12: mod_base = OTHER; note = 2'-O-methylguanosine-3'-phosphate
  modified_base 13: mod_base = OTHER; note = 2'-O-methyladenosine-3'-phosphate
  modified_base 14: mod_base = OTHER; note = 2'-deoxy-2'-fluoroadenosine-3'-phosphate
  modified_base 15: mod_base = OTHER; note = 2'-O-methylcytidine-3'-phosphate
  modified_base 16: mod_base = OTHER; note = 2'-deoxy-2'-fluoroadenosine-3'-phosphate
  modified_base 17: mod_base = OTHER; note = 2'-O-methylcytidine-3'-phosphate
  modified_base 18: mod_base = OTHER; note = 2'-deoxy-2'-fluorouridine-3'-phosphate
  modified_base 19: mod_base = OTHER; note = 2'-O-methylguanosine-3'-phosphate
  modified_base 20: mod_base = OTHER; note = 4'-(S)-methyl-1-(alpha-L-threofuranosyl)thymine 2'-phosphate
  modified_base 21: mod_base = OTHER; note = 2'-O-methyluridine-3'-phosphorothioate
  modified_base 22: mod_base = OTHER; note = 2'-O-methyluridine-3'-phosphorothioate
  modified_base 23: mod_base = OTHER; note = 2'-O-methyluridine
ttatagagcaagaacactgtttt

SEQ ID NO: 197 - RNA, 23 nt, synthetic construct
  source 1..23: mol_type = other RNA
  modified_base 1: mod_base = OTHER; note = 2'-O-methyluridine-3'-phosphorothioate
  modified_base 2: mod_base = OTHER; note = 2'-deoxy-2'-fluorouridine-3'-phosphorothioate
  modified_base 3: mod_base = OTHER; note = 2'-O-methyladenosine-3'-phosphate
  modified_base 4: mod_base = OTHER; note = 2'-deoxy-2'-fluorouridine-3'-phosphate
  modified_base 5: mod_base = OTHER; note = 2'-O-methyladenosine-3'-phosphate
  modified_base 6: mod_base = OTHER; note = 2'-deoxy-2'-fluoroguanosine-3'-phosphate
  modified_base 7: mod_base = OTHER; note = 2'-O-methyladenosine-3'-phosphate
  modified_base 8: mod_base = OTHER; note = 2'-deoxy-2'-fluoroguanosine-3'-phosphate
  modified_base 9: mod_base = OTHER; note = 2'-O-methylcytidine-3'-phosphate
  modified_base 10: mod_base = OTHER; note = 2'-deoxy-2'-fluoroadenosine-3'-phosphate
  modified_base 11: mod_base = OTHER; note = 2'-O-methyladenosine-3'-phosphate
  modified_base 12: mod_base = OTHER; note = 2'-O-methylguanosine-3'-phosphate
  modified_base 13: mod_base = OTHER; note = 2'-O-methyladenosine-3'-phosphate
  modified_base 14: mod_base = OTHER; note = 2'-deoxy-2'-fluoroadenosine-3'-phosphate
  modified_base 15: mod_base = OTHER; note = 2'-O-methylcytidine-3'-phosphate
  modified_base 16: mod_base = OTHER; note = 2'-deoxy-2'-fluoroadenosine-3'-phosphate
  modified_base 17: mod_base = OTHER; note = 2'-O-methylcytidine-3'-phosphate
  modified_base 18: mod_base = OTHER; note = 2'-deoxy-2'-fluorouridine-3'-phosphate
  modified_base 19: mod_base = OTHER; note = 2'-O-methylguanosine-3'-phosphate
  modified_base 20: mod_base = OTHER; note = 2'-deoxy-2'-fluorouridine-3'-phosphate
  modified_base 21: mod_base = OTHER; note = 4'-(S)-methyl-1-(alpha-L-threofuranosyl)thymine 2'- phosphorothioate
  modified_base 22: mod_base = OTHER; note = 2'-O-methyluridine-3'-phosphorothioate
  modified_base 23: mod_base = OTHER; note = 2'-O-methyluridine
ttatagagcaagaacactgtttt

SEQ ID NO: 198 - RNA, 23 nt, synthetic construct
  source 1..23: mol_type = other RNA
  modified_base 1: mod_base = OTHER; note = 2'-O-methyluridine-3'-phosphorothioate
  modified_base 2: mod_base = OTHER; note = 2'-deoxy-2'-fluorouridine-3'-phosphorothioate
  modified_base 3: mod_base = OTHER; note = 2'-O-methyladenosine-3'-phosphate
  modified_base 4: mod_base = OTHER; note = 2'-deoxy-2'-fluorouridine-3'-phosphate
  modified_base 5: mod_base = OTHER; note = 2'-O-methyladenosine-3'-phosphate
  modified_base 6: mod_base = OTHER; note = 2'-deoxy-2'-fluoroguanosine-3'-phosphate
  modified_base 7: mod_base = OTHER; note = 2'-O-methyladenosine-3'-phosphate
  modified_base 8: mod_base = OTHER; note = 2'-deoxy-2'-fluoroguanosine-3'-phosphate
  modified_base 9: mod_base = OTHER; note = 2'-O-methylcytidine-3'-phosphate
  modified_base 10: mod_base = OTHER; note = 2'-deoxy-2'-fluoroadenosine-3'-phosphate
  modified_base 11: mod_base = OTHER; note = 2'-O-methyladenosine-3'-phosphate
  modified_base 12: mod_base = OTHER; note = 2'-O-methylguanosine-3'-phosphate
  modified_base 13: mod_base = OTHER; note = 2'-O-methyladenosine-3'-phosphate
  modified_base 14: mod_base = OTHER; note = 2'-deoxy-2'-fluoroadenosine-3'-phosphate
  modified_base 15: mod_base = OTHER; note = 2'-O-methylcytidine-3'-phosphate
  modified_base 16: mod_base = OTHER; note = 2'-deoxy-2'-fluoroadenosine-3'-phosphate
  modified_base 17: mod_base = OTHER; note = 2'-O-methylcytidine-3'-phosphate
  modified_base 18: mod_base = OTHER; note = 2'-deoxy-2'-fluorouridine-3'-phosphate
  modified_base 19: mod_base = OTHER; note = 2'-O-methylguanosine-3'-phosphate
  modified_base 20: mod_base = OTHER; note = 2'-deoxy-2'-fluorouridine-3'-phosphate
  modified_base 21: mod_base = OTHER; note = 2'-O-methyluridine-3'-phosphorothioate
  modified_base 22: mod_base = OTHER; note = 4'-(S)-methyl-1-(alpha-L-threofuranosyl)thymine 2'- phosphorothioate
  modified_base 23: mod_base = OTHER; note = 2'-O-methyluridine
ttatagagcaagaacactgtttt

SEQ ID NO: 199 - RNA, 23 nt, synthetic construct
  source 1..23: mol_type = other RNA
  modified_base 1: mod_base = OTHER; note = 2'-O-methyluridine-3'-phosphorothioate
  modified_base 2: mod_base = OTHER; note = 2'-deoxy-2'-fluorouridine-3'-phosphorothioate
  modified_base 3: mod_base = OTHER; note = 2'-O-methyladenosine-3'-phosphate
  modified_base 4: mod_base = OTHER; note = 2'-deoxy-2'-fluorouridine-3'-phosphate
  modified_base 5: mod_base = OTHER; note = 2'-O-methyladenosine-3'-phosphate
  modified_base 6: mod_base = OTHER; note = 2'-deoxy-2'-fluoroguanosine-3'-phosphate
  modified_base 7: mod_base = OTHER; note = 2'-O-methyladenosine-3'-phosphate
  modified_base 8: mod_base = OTHER; note = 2'-deoxy-2'-fluoroguanosine-3'-phosphate
  modified_base 9: mod_base = OTHER; note = 2'-O-methylcytidine-3'-phosphate
  modified_base 10: mod_base = OTHER; note = 2'-deoxy-2'-fluoroadenosine-3'-phosphate
  modified_base 11: mod_base = OTHER; note = 2'-O-methyladenosine-3'-phosphate
  modified_base 12: mod_base = OTHER; note = 2'-O-methylguanosine-3'-phosphate
  modified_base 13: mod_base = OTHER; note = 2'-O-methyladenosine-3'-phosphate
  modified_base 14: mod_base = OTHER; note = 2'-deoxy-2'-fluoroadenosine-3'-phosphate
  modified_base 15: mod_base = OTHER; note = 2'-O-methylcytidine-3'-phosphate
  modified_base 16: mod_base = OTHER; note = 2'-deoxy-2'-fluoroadenosine-3'-phosphate
  modified_base 17: mod_base = OTHER; note = 2'-O-methylcytidine-3'-phosphate
  modified_base 18: mod_base = OTHER; note = 2'-deoxy-2'-fluorouridine-3'-phosphate
  modified_base 19: mod_base = OTHER; note = 2'-O-methylguanosine-3'-phosphate
  modified_base 20: mod_base = OTHER; note = 2'-deoxy-2'-fluorouridine-3'-phosphate
  modified_base 21: mod_base = OTHER; note = 2'-O-methyluridine-3'-phosphorothioate
  modified_base 22: mod_base = OTHER; note = 2'-O-methyluridine-3'-phosphorothioate
  modified_base 23: mod_base = OTHER; note = 4'-(S)-methyl-1-(alpha-L-threofuranosyl)thymine
ttatagagcaagaacactgtttt

SEQ ID NO: 200 - RNA, 23 nt, synthetic construct
  source 1..23: mol_type = other RNA
  modified_base 1: mod_base = OTHER; note = 4'-(R)-methyl-1-(alpha-L-threofuranosyl)thymine 2'- phosphorothioate
  modified_base 2: mod_base = OTHER; note = 2'-deoxy-2'-fluorouridine-3'-phosphorothioate
  modified_base 3: mod_base = OTHER; note = 2'-O-methyladenosine-3'-phosphate
  modified_base 4: mod_base = OTHER; note = 2'-deoxy-2'-fluorouridine-3'-phosphate
  modified_base 5: mod_base = OTHER; note = 2'-O-methyladenosine-3'-phosphate
  modified_base 6: mod_base = OTHER; note = 2'-deoxy-2'-fluoroguanosine-3'-phosphate
  modified_base 7: mod_base = OTHER; note = 2'-O-methyladenosine-3'-phosphate
  modified_base 8: mod_base = OTHER; note = 2'-deoxy-2'-fluoroguanosine-3'-phosphate
  modified_base 9: mod_base = OTHER; note = 2'-O-methylcytidine-3'-phosphate
  modified_base 10: mod_base = OTHER; note = 2'-deoxy-2'-fluoroadenosine-3'-phosphate
  modified_base 11: mod_base = OTHER; note = 2'-O-methyladenosine-3'-phosphate
  modified_base 12: mod_base = OTHER; note = 2'-O-methylguanosine-3'-phosphate
  modified_base 13: mod_base = OTHER; note = 2'-O-methyladenosine-3'-phosphate
  modified_base 14: mod_base = OTHER; note = 2'-deoxy-2'-fluoroadenosine-3'-phosphate
  modified_base 15: mod_base = OTHER; note = 2'-O-methylcytidine-3'-phosphate
  modified_base 16: mod_base = OTHER; note = 2'-deoxy-2'-fluoroadenosine-3'-phosphate
  modified_base 17: mod_base = OTHER; note = 2'-O-methylcytidine-3'-phosphate
  modified_base 18: mod_base = OTHER; note = 2'-deoxy-2'-fluorouridine-3'-phosphate
  modified_base 19: mod_base = OTHER; note = 2'-O-methylguanosine-3'-phosphate
  modified_base 20: mod_base = OTHER; note = 2'-deoxy-2'-fluorouridine-3'-phosphate
  modified_base 21: mod_base = OTHER; note = 2'-O-methyluridine-3'-phosphorothioate
  modified_base 22: mod_base = OTHER; note = 2'-O-methyluridine-3'-phosphorothioate
  modified_base 23: mod_base = OTHER; note = 2'-O-methyluridine
ttatagagcaagaacactgtttt

SEQ ID NO: 201 - RNA, 23 nt, synthetic construct
  source 1..23: mol_type = other RNA
  modified_base 1: mod_base = OTHER; note = 2'-O-methyluridine-3'-phosphorothioate
  modified_base 2: mod_base = OTHER; note = 4'-(R)-methyl-1-(alpha-L-threofuranosyl)thymine 2'- phosphorothioate
  modified_base 3: mod_base = OTHER; note = 2'-O-methyladenosine-3'-phosphate
  modified_base 4: mod_base = OTHER; note = 2'-deoxy-2'-fluorouridine-3'-phosphate
  modified_base 5: mod_base = OTHER; note = 2'-O-methyladenosine-3'-phosphate
  modified_base 6: mod_base = OTHER; note = 2'-deoxy-2'-fluoroguanosine-3'-phosphate
  modified_base 7: mod_base = OTHER; note = 2'-O-methyladenosine-3'-phosphate
  modified_base 8: mod_base = OTHER; note = 2'-deoxy-2'-fluoroguanosine-3'-phosphate
  modified_base 9: mod_base = OTHER; note = 2'-O-methylcytidine-3'-phosphate
  modified_base 10: mod_base = OTHER; note = 2'-deoxy-2'-fluoroadenosine-3'-phosphate
  modified_base 11: mod_base = OTHER; note = 2'-O-methyladenosine-3'-phosphate
  modified_base 12: mod_base = OTHER; note = 2'-O-methylguanosine-3'-phosphate
  modified_base 13: mod_base = OTHER; note = 2'-O-methyladenosine-3'-phosphate
  modified_base 14: mod_base = OTHER; note = 2'-deoxy-2'-fluoroadenosine-3'-phosphate
  modified_base 15: mod_base = OTHER; note = 2'-O-methylcytidine-3'-phosphate
  modified_base 16: mod_base = OTHER; note = 2'-deoxy-2'-fluoroadenosine-3'-phosphate
  modified_base 17: mod_base = OTHER; note = 2'-O-methylcytidine-3'-phosphate
  modified_base 18: mod_base = OTHER; note = 2'-deoxy-2'-fluorouridine-3'-phosphate
  modified_base 19: mod_base = OTHER; note = 2'-O-methylguanosine-3'-phosphate
  modified_base 20: mod_base = OTHER; note = 2'-deoxy-2'-fluorouridine-3'-phosphate
  modified_base 21: mod_base = OTHER; note = 2'-O-methyluridine-3'-phosphorothioate
  modified_base 22: mod_base = OTHER; note = 2'-O-methyluridine-3'-phosphorothioate
  modified_base 23: mod_base = OTHER; note = 2'-O-methyluridine
ttatagagcaagaacactgtttt

SEQ ID NO: 202 - RNA, 23 nt, synthetic construct
  source 1..23: mol_type = other RNA
  modified_base 1: mod_base = OTHER; note = 2'-O-methyluridine-3'-phosphorothioate
  modified_base 2: mod_base = OTHER; note = 2'-deoxy-2'-fluorouridine-3'-phosphorothioate
  modified_base 3: mod_base = OTHER; note = 4'-(R)-methyl-9-(alpha-L-threofuranosyl)adenine 2'-phosphate
  modified_base 4: mod_base = OTHER; note = 2'-deoxy-2'-fluorouridine-3'-phosphate
  modified_base 5: mod_base = OTHER; note = 2'-O-methyladenosine-3'-phosphate
  modified_base 6: mod_base = OTHER; note = 2'-deoxy-2'-fluoroguanosine-3'-phosphate
  modified_base 7: mod_base = OTHER; note = 2'-O-methyladenosine-3'-phosphate
  modified_base 8: mod_base = OTHER; note = 2'-deoxy-2'-fluoroguanosine-3'-phosphate
  modified_base 9: mod_base = OTHER; note = 2'-O-methylcytidine-3'-phosphate
  modified_base 10: mod_base = OTHER; note = 2'-deoxy-2'-fluoroadenosine-3'-phosphate
  modified_base 11: mod_base = OTHER; note = 2'-O-methyladenosine-3'-phosphate
  modified_base 12: mod_base = OTHER; note = 2'-O-methylguanosine-3'-phosphate
  modified_base 13: mod_base = OTHER; note = 2'-O-methyladenosine-3'-phosphate
  modified_base 14: mod_base = OTHER; note = 2'-deoxy-2'-fluoroadenosine-3'-phosphate
  modified_base 15: mod_base = OTHER; note = 2'-O-methylcytidine-3'-phosphate
  modified_base 16: mod_base = OTHER; note = 2'-deoxy-2'-fluoroadenosine-3'-phosphate
  modified_base 17: mod_base = OTHER; note = 2'-O-methylcytidine-3'-phosphate
  modified_base 18: mod_base = OTHER; note = 2'-deoxy-2'-fluorouridine-3'-phosphate
  modified_base 19: mod_base = OTHER; note = 2'-O-methylguanosine-3'-phosphate
  modified_base 20: mod_base = OTHER; note = 2'-deoxy-2'-fluorouridine-3'-phosphate
  modified_base 21: mod_base = OTHER; note = 2'-O-methyluridine-3'-phosphorothioate
  modified_base 22: mod_base = OTHER; note = 2'-O-methyluridine-3'-phosphorothioate
  modified_base 23: mod_base = OTHER; note = 2'-O-methyluridine
ttatagagcaagaacactgtttt

SEQ ID NO: 203 - RNA, 23 nt, synthetic construct
  source 1..23: mol_type = other RNA
  modified_base 1: mod_base = OTHER; note = 2'-O-methyluridine-3'-phosphorothioate
  modified_base 2: mod_base = OTHER; note = 2'-deoxy-2'-fluorouridine-3'-phosphorothioate
  modified_base 3: mod_base = OTHER; note = 2'-O-methyladenosine-3'-phosphate
  modified_base 4: mod_base = OTHER; note = 4'-(R)-methyl-1-(alpha-L-threofuranosyl)thymine 2'-phosphate
  modified_base 5: mod_base = OTHER; note = 2'-O-methyladenosine-3'-phosphate
  modified_base 6: mod_base = OTHER; note = 2'-deoxy-2'-fluoroguanosine-3'-phosphate
  modified_base 7: mod_base = OTHER; note = 2'-O-methyladenosine-3'-phosphate
  modified_base 8: mod_base = OTHER; note = 2'-deoxy-2'-fluoroguanosine-3'-phosphate
  modified_base 9: mod_base = OTHER; note = 2'-O-methylcytidine-3'-phosphate
  modified_base 10: mod_base = OTHER; note = 2'-deoxy-2'-fluoroadenosine-3'-phosphate
  modified_base 11: mod_base = OTHER; note = 2'-O-methyladenosine-3'-phosphate
  modified_base 12: mod_base = OTHER; note = 2'-O-methylguanosine-3'-phosphate
  modified_base 13: mod_base = OTHER; note = 2'-O-methyladenosine-3'-phosphate
  modified_base 14: mod_base = OTHER; note = 2'-deoxy-2'-fluoroadenosine-3'-phosphate
  modified_base 15: mod_base = OTHER; note = 2'-O-methylcytidine-3'-phosphate
  modified_base 16: mod_base = OTHER; note = 2'-deoxy-2'-fluoroadenosine-3'-phosphate
  modified_base 17: mod_base = OTHER; note = 2'-O-methylcytidine-3'-phosphate
  modified_base 18: mod_base = OTHER; note = 2'-deoxy-2'-fluorouridine-3'-phosphate
  modified_base 19: mod_base = OTHER; note = 2'-O-methylguanosine-3'-phosphate
  modified_base 20: mod_base = OTHER; note = 2'-deoxy-2'-fluorouridine-3'-phosphate
  modified_base 21: mod_base = OTHER; note = 2'-O-methyluridine-3'-phosphorothioate
  modified_base 22: mod_base = OTHER; note = 2'-O-methyluridine-3'-phosphorothioate
  modified_base 23: mod_base = OTHER; note = 2'-O-methyluridine
ttatagagcaagaacactgtttt

SEQ ID NO: 204 - RNA, 23 nt, synthetic construct
  source 1..23: mol_type = other RNA
  modified_base 1: mod_base = OTHER; note = 2'-O-methyluridine-3'-phosphorothioate
  modified_base 2: mod_base = OTHER; note = 2'-deoxy-2'-fluorouridine-3'-phosphorothioate
  modified_base 3: mod_base = OTHER; note = 2'-O-methyladenosine-3'-phosphate
  modified_base 4: mod_base = OTHER; note = 2'-deoxy-2'-fluorouridine-3'-phosphate
  modified_base 5: mod_base = OTHER; note = 4'-(R)-methyl-9-(alpha-L-threofuranosyl)adenine 2'-phosphate
  modified_base 6: mod_base = OTHER; note = 2'-deoxy-2'-fluoroguanosine-3'-phosphate
  modified_base 7: mod_base = OTHER; note = 2'-O-methyladenosine-3'-phosphate
  modified_base 8: mod_base = OTHER; note = 2'-deoxy-2'-fluoroguanosine-3'-phosphate
  modified_base 9: mod_base = OTHER; note = 2'-O-methylcytidine-3'-phosphate
  modified_base 10: mod_base = OTHER; note = 2'-deoxy-2'-fluoroadenosine-3'-phosphate
  modified_base 11: mod_base = OTHER; note = 2'-O-methyladenosine-3'-phosphate
  modified_base 12: mod_base = OTHER; note = 2'-O-methylguanosine-3'-phosphate
  modified_base 13: mod_base = OTHER; note = 2'-O-methyladenosine-3'-phosphate
  modified_base 14: mod_base = OTHER; note = 2'-deoxy-2'-fluoroadenosine-3'-phosphate
  modified_base 15: mod_base = OTHER; note = 2'-O-methylcytidine-3'-phosphate
  modified_base 16: mod_base = OTHER; note = 2'-deoxy-2'-fluoroadenosine-3'-phosphate
  modified_base 17: mod_base = OTHER; note = 2'-O-methylcytidine-3'-phosphate
  modified_base 18: mod_base = OTHER; note = 2'-deoxy-2'-fluorouridine-3'-phosphate
  modified_base 19: mod_base = OTHER; note = 2'-O-methylguanosine-3'-phosphate
  modified_base 20: mod_base = OTHER; note = 2'-deoxy-2'-fluorouridine-3'-phosphate
  modified_base 21: mod_base = OTHER; note = 2'-O-methyluridine-3'-phosphorothioate
  modified_base 22: mod_base = OTHER; note = 2'-O-methyluridine-3'-phosphorothioate
  modified_base 23: mod_base = OTHER; note = 2'-O-methyluridine
ttatagagcaagaacactgtttt

SEQ ID NO: 205 - RNA, 23 nt, synthetic construct
  source 1..23: mol_type = other RNA
  modified_base 1: mod_base = OTHER; note = 2'-O-methyluridine-3'-phosphorothioate
  modified_base 2: mod_base = OTHER; note = 2'-deoxy-2'-fluorouridine-3'-phosphorothioate
  modified_base 3: mod_base = OTHER; note = 2'-O-methyladenosine-3'-phosphate
  modified_base 4: mod_base = OTHER; note = 2'-deoxy-2'-fluorouridine-3'-phosphate
  modified_base 5: mod_base = OTHER; note = 2'-O-methyladenosine-3'-phosphate
  modified_base 6: mod_base = OTHER; note = 4'-(R)-methyl-9-(alpha-L-threofuranosyl)guanine 2'-phosphate
  modified_base 7: mod_base = OTHER; note = 2'-O-methyladenosine-3'-phosphate
  modified_base 8: mod_base = OTHER; note = 2'-deoxy-2'-fluoroguanosine-3'-phosphate
  modified_base 9: mod_base = OTHER; note = 2'-O-methylcytidine-3'-phosphate
  modified_base 10: mod_base = OTHER; note = 2'-deoxy-2'-fluoroadenosine-3'-phosphate
  modified_base 11: mod_base = OTHER; note = 2'-O-methyladenosine-3'-phosphate
  modified_base 12: mod_base = OTHER; note = 2'-O-methylguanosine-3'-phosphate
  modified_base 13: mod_base = OTHER; note = 2'-O-methyladenosine-3'-phosphate
  modified_base 14: mod_base = OTHER; note = 2'-deoxy-2'-fluoroadenosine-3'-phosphate
  modified_base 15: mod_base = OTHER; note = 2'-O-methylcytidine-3'-phosphate
  modified_base 16: mod_base = OTHER; note = 2'-deoxy-2'-fluoroadenosine-3'-phosphate
  modified_base 17: mod_base = OTHER; note = 2'-O-methylcytidine-3'-phosphate
  modified_base 18: mod_base = OTHER; note = 2'-deoxy-2'-fluorouridine-3'-phosphate
  modified_base 19: mod_base = OTHER; note = 2'-O-methylguanosine-3'-phosphate
  modified_base 20: mod_base = OTHER; note = 2'-deoxy-2'-fluorouridine-3'-phosphate
  modified_base 21: mod_base = OTHER; note = 2'-O-methyluridine-3'-phosphorothioate
  modified_base 22: mod_base = OTHER; note = 2'-O-methyluridine-3'-phosphorothioate
  modified_base 23: mod_base = OTHER; note = 2'-O-methyluridine
ttatagagcaagaacactgtttt

SEQ ID NO: 206 - RNA, 23 nt, synthetic construct
  source 1..23: mol_type = other RNA
  modified_base 1: mod_base = OTHER; note = 2'-O-methyluridine-3'-phosphorothioate
  modified_base 2: mod_base = OTHER; note = 2'-deoxy-2'-fluorouridine-3'-phosphorothioate
  modified_base 3: mod_base = OTHER; note = 2'-O-methyladenosine-3'-phosphate
  modified_base 4: mod_base = OTHER; note = 2'-deoxy-2'-fluorouridine-3'-phosphate
  modified_base 5: mod_base = OTHER; note = 2'-O-methyladenosine-3'-phosphate
  modified_base 6: mod_base = OTHER; note = 2'-deoxy-2'-fluoroguanosine-3'-phosphate
  modified_base 7: mod_base = OTHER; note = 4'-(R)-methyl-9-(alpha-L-threofuranosyl)adenine 2'-phosphate
  modified_base 8: mod_base = OTHER; note = 2'-deoxy-2'-fluoroguanosine-3'-phosphate
  modified_base 9: mod_base = OTHER; note = 2'-O-methylcytidine-3'-phosphate
  modified_base 10: mod_base = OTHER; note = 2'-deoxy-2'-fluoroadenosine-3'-phosphate
  modified_base 11: mod_base = OTHER; note = 2'-O-methyladenosine-3'-phosphate
  modified_base 12: mod_base = OTHER; note = 2'-O-methylguanosine-3'-phosphate
  modified_base 13: mod_base = OTHER; note = 2'-O-methyladenosine-3'-phosphate
  modified_base 14: mod_base = OTHER; note = 2'-deoxy-2'-fluoroadenosine-3'-phosphate
  modified_base 15: mod_base = OTHER; note = 2'-O-methylcytidine-3'-phosphate
  modified_base 16: mod_base = OTHER; note = 2'-deoxy-2'-fluoroadenosine-3'-phosphate
  modified_base 17: mod_base = OTHER; note = 2'-O-methylcytidine-3'-phosphate
  modified_base 18: mod_base = OTHER; note = 2'-deoxy-2'-fluorouridine-3'-phosphate
  modified_base 19: mod_base = OTHER; note = 2'-O-methylguanosine-3'-phosphate
  modified_base 20: mod_base = OTHER; note = 2'-deoxy-2'-fluorouridine-3'-phosphate
  modified_base 21: mod_base = OTHER; note = 2'-O-methyluridine-3'-phosphorothioate
  modified_base 22: mod_base = OTHER; note = 2'-O-methyluridine-3'-phosphorothioate
  modified_base 23: mod_base = OTHER; note = 2'-O-methyluridine
ttatagagcaagaacactgtttt

SEQ ID NO: 207 - RNA, 23 nt, synthetic construct
  source 1..23: mol_type = other RNA
  modified_base 1: mod_base = OTHER; note = 2'-O-methyluridine-3'-phosphorothioate
  modified_base 2: mod_base = OTHER; note = 2'-deoxy-2'-fluorouridine-3'-phosphorothioate
  modified_base 3: mod_base = OTHER; note = 2'-O-methyladenosine-3'-phosphate
  modified_base 4: mod_base = OTHER; note = 2'-deoxy-2'-fluorouridine-3'-phosphate
  modified_base 5: mod_base = OTHER; note = 2'-O-methyladenosine-3'-phosphate
  modified_base 6: mod_base = OTHER; note = 2'-deoxy-2'-fluoroguanosine-3'-phosphate
  modified_base 7: mod_base = OTHER; note = 2'-O-methyladenosine-3'-phosphate
  modified_base 8: mod_base = OTHER; note = 4'-(R)-methyl-9-(alpha-L-threofuranosyl)guanine 2'-phosphate
  modified_base 9: mod_base = OTHER; note = 2'-O-methylcytidine-3'-phosphate
  modified_base 10: mod_base = OTHER; note = 2'-deoxy-2'-fluoroadenosine-3'-phosphate
  modified_base 11: mod_base = OTHER; note = 2'-O-methyladenosine-3'-phosphate
  modified_base 12: mod_base = OTHER; note = 2'-O-methylguanosine-3'-phosphate
  modified_base 13: mod_base = OTHER; note = 2'-O-methyladenosine-3'-phosphate
  modified_base 14: mod_base = OTHER; note = 2'-deoxy-2'-fluoroadenosine-3'-phosphate
  modified_base 15: mod_base = OTHER; note = 2'-O-methylcytidine-3'-phosphate
  modified_base 16: mod_base = OTHER; note = 2'-deoxy-2'-fluoroadenosine-3'-phosphate
  modified_base 17: mod_base = OTHER; note = 2'-O-methylcytidine-3'-phosphate
  modified_base 18: mod_base = OTHER; note = 2'-deoxy-2'-fluorouridine-3'-phosphate
  modified_base 19: mod_base = OTHER; note = 2'-O-methylguanosine-3'-phosphate
  modified_base 20: mod_base = OTHER; note = 2'-deoxy-2'-fluorouridine-3'-phosphate
  modified_base 21: mod_base = OTHER; note = 2'-O-methyluridine-3'-phosphorothioate
  modified_base 22: mod_base = OTHER; note = 2'-O-methyluridine-3'-phosphorothioate
  modified_base 23: mod_base = OTHER; note = 2'-O-methyluridine
ttatagagcaagaacactgtttt

SEQ ID NO: 208 - RNA, 23 nt, synthetic construct
  source 1..23: mol_type = other RNA
  modified_base 1: mod_base = OTHER; note = 2'-O-methyluridine-3'-phosphorothioate
  modified_base 2: mod_base = OTHER; note = 2'-deoxy-2'-fluorouridine-3'-phosphorothioate
  modified_base 3: mod_base = OTHER; note = 2'-O-methyladenosine-3'-phosphate
  modified_base 4: mod_base = OTHER; note = 2'-deoxy-2'-fluorouridine-3'-phosphate
  modified_base 5: mod_base = OTHER; note = 2'-O-methyladenosine-3'-phosphate
  modified_base 6: mod_base = OTHER; note = 2'-deoxy-2'-fluoroguanosine-3'-phosphate
  modified_base 7: mod_base = OTHER; note = 2'-O-methyladenosine-3'-phosphate
  modified_base 8: mod_base = OTHER; note = 2'-deoxy-2'-fluoroguanosine-3'-phosphate
  modified_base 9: mod_base = OTHER; note = 4'-(R)-methyl-1-(alpha-L-threofuranosyl)cytosine 2'-phosphate
  modified_base 10: mod_base = OTHER; note = 2'-deoxy-2'-fluoroadenosine-3'-phosphate
  modified_base 11: mod_base = OTHER; note = 2'-O-methyladenosine-3'-phosphate
  modified_base 12: mod_base = OTHER; note = 2'-O-methylguanosine-3'-phosphate
  modified_base 13: mod_base = OTHER; note = 2'-O-methyladenosine-3'-phosphate
  modified_base 14: mod_base = OTHER; note = 2'-deoxy-2'-fluoroadenosine-3'-phosphate
  modified_base 15: mod_base = OTHER; note = 2'-O-methylcytidine-3'-phosphate
  modified_base 16: mod_base = OTHER; note = 2'-deoxy-2'-fluoroadenosine-3'-phosphate
  modified_base 17: mod_base = OTHER; note = 2'-O-methylcytidine-3'-phosphate
  modified_base 18: mod_base = OTHER; note = 2'-deoxy-2'-fluorouridine-3'-phosphate
  modified_base 19: mod_base = OTHER; note = 2'-O-methylguanosine-3'-phosphate
  modified_base 20: mod_base = OTHER; note = 2'-deoxy-2'-fluorouridine-3'-phosphate
  modified_base 21: mod_base = OTHER; note = 2'-O-methyluridine-3'-phosphorothioate
  modified_base 22: mod_base = OTHER; note = 2'-O-methyluridine-3'-phosphorothioate
  modified_base 23: mod_base = OTHER; note = 2'-O-methyluridine
ttatagagcaagaacactgtttt

SEQ ID NO: 209 - RNA, 23 nt, synthetic construct
  source 1..23: mol_type = other RNA
  modified_base 1: mod_base = OTHER; note = 2'-O-methyluridine-3'-phosphorothioate
  modified_base 2: mod_base = OTHER; note = 2'-deoxy-2'-fluorouridine-3'-phosphorothioate
  modified_base 3: mod_base = OTHER; note = 2'-O-methyladenosine-3'-phosphate
  modified_base 4: mod_base = OTHER; note = 2'-deoxy-2'-fluorouridine-3'-phosphate
  modified_base 5: mod_base = OTHER; note = 2'-O-methyladenosine-3'-phosphate
  modified_base 6: mod_base = OTHER; note = 2'-deoxy-2'-fluoroguanosine-3'-phosphate
  modified_base 7: mod_base = OTHER; note = 2'-O-methyladenosine-3'-phosphate
  modified_base 8: mod_base = OTHER; note = 2'-deoxy-2'-fluoroguanosine-3'-phosphate
  modified_base 9: mod_base = OTHER; note = 2'-O-methylcytidine-3'-phosphate
  modified_base 10: mod_base = OTHER; note = 4'-(R)-methyl-9-(alpha-L-threofuranosyl)adenine 2'-phosphate
  modified_base 11: mod_base = OTHER; note = 2'-O-methyladenosine-3'-phosphate
  modified_base 12: mod_base = OTHER; note = 2'-O-methylguanosine-3'-phosphate
  modified_base 13: mod_base = OTHER; note = 2'-O-methyladenosine-3'-phosphate
  modified_base 14: mod_base = OTHER; note = 2'-deoxy-2'-fluoroadenosine-3'-phosphate
  modified_base 15: mod_base = OTHER; note = 2'-O-methylcytidine-3'-phosphate
  modified_base 16: mod_base = OTHER; note = 2'-deoxy-2'-fluoroadenosine-3'-phosphate
  modified_base 17: mod_base = OTHER; note = 2'-O-methylcytidine-3'-phosphate
  modified_base 18: mod_base = OTHER; note = 2'-deoxy-2'-fluorouridine-3'-phosphate
  modified_base 19: mod_base = OTHER; note = 2'-O-methylguanosine-3'-phosphate
  modified_base 20: mod_base = OTHER; note = 2'-deoxy-2'-fluorouridine-3'-phosphate
  modified_base 21: mod_base = OTHER; note = 2'-O-methyluridine-3'-phosphorothioate
  modified_base 22: mod_base = OTHER; note = 2'-O-methyluridine-3'-phosphorothioate
  modified_base 23: mod_base = OTHER; note = 2'-O-methyluridine
ttatagagcaagaacactgtttt

SEQ ID NO: 210 - RNA, 23 nt, synthetic construct
  source 1..23: mol_type = other RNA
  modified_base 1: mod_base = OTHER; note = 2'-O-methyluridine-3'-phosphorothioate
  modified_base 2: mod_base = OTHER; note = 2'-deoxy-2'-fluorouridine-3'-phosphorothioate
  modified_base 3: mod_base = OTHER; note = 2'-O-methyladenosine-3'-phosphate
  modified_base 4: mod_base = OTHER; note = 2'-deoxy-2'-fluorouridine-3'-phosphate
  modified_base 5: mod_base = OTHER; note = 2'-O-methyladenosine-3'-phosphate
  modified_base 6: mod_base = OTHER; note = 2'-deoxy-2'-fluoroguanosine-3'-phosphate
  modified_base 7: mod_base = OTHER; note = 2'-O-methyladenosine-3'-phosphate
  modified_base 8: mod_base = OTHER; note = 2'-deoxy-2'-fluoroguanosine-3'-phosphate
  modified_base 9: mod_base = OTHER; note = 2'-O-methylcytidine-3'-phosphate
  modified_base 10: mod_base = OTHER; note = 2'-deoxy-2'-fluoroadenosine-3'-phosphate
  modified_base 11: mod_base = OTHER; note = 4'-(R)-methyl-9-(alpha-L-threofuranosyl)adenine 2'-phosphate
  modified_base 12: mod_base = OTHER; note = 2'-O-methylguanosine-3'-phosphate
  modified_base 13: mod_base = OTHER; note = 2'-O-methyladenosine-3'-phosphate
  modified_base 14: mod_base = OTHER; note = 2'-deoxy-2'-fluoroadenosine-3'-phosphate
  modified_base 15: mod_base = OTHER; note = 2'-O-methylcytidine-3'-phosphate
  modified_base 16: mod_base = OTHER; note = 2'-deoxy-2'-fluoroadenosine-3'-phosphate
  modified_base 17: mod_base = OTHER; note = 2'-O-methylcytidine-3'-phosphate
  modified_base 18: mod_base = OTHER; note = 2'-deoxy-2'-fluorouridine-3'-phosphate
  modified_base 19: mod_base = OTHER; note = 2'-O-methylguanosine-3'-phosphate
  modified_base 20: mod_base = OTHER; note = 2'-deoxy-2'-fluorouridine-3'-phosphate
  modified_base 21: mod_base = OTHER; note = 2'-O-methyluridine-3'-phosphorothioate
  modified_base 22: mod_base = OTHER; note = 2'-O-methyluridine-3'-phosphorothioate
  modified_base 23: mod_base = OTHER; note = 2'-O-methyluridine
ttatagagcaagaacactgtttt

SEQ ID NO: 211 - RNA, 23 nt, synthetic construct
  source 1..23: mol_type = other RNA
  modified_base 1: mod_base = OTHER; note = 2'-O-methyluridine-3'-phosphorothioate
  modified_base 2: mod_base = OTHER; note = 2'-deoxy-2'-fluorouridine-3'-phosphorothioate
  modified_base 3: mod_base = OTHER; note = 2'-O-methyladenosine-3'-phosphate
  modified_base 4: mod_base = OTHER; note = 2'-deoxy-2'-fluorouridine-3'-phosphate
  modified_base 5: mod_base = OTHER; note = 2'-O-methyladenosine-3'-phosphate
  modified_base 6: mod_base = OTHER; note = 2'-deoxy-2'-fluoroguanosine-3'-phosphate
  modified_base 7: mod_base = OTHER; note = 2'-O-methyladenosine-3'-phosphate
  modified_base 8: mod_base = OTHER; note = 2'-deoxy-2'-fluoroguanosine-3'-phosphate
  modified_base 9: mod_base = OTHER; note = 2'-O-methylcytidine-3'-phosphate
  modified_base 10: mod_base = OTHER; note = 2'-deoxy-2'-fluoroadenosine-3'-phosphate
  modified_base 11: mod_base = OTHER; note = 2'-O-methyladenosine-3'-phosphate
  modified_base 12: mod_base = OTHER; note = 4'-(R)-methyl-9-(alpha-L-threofuranosyl)guanine 2'-phosphate
  modified_base 13: mod_base = OTHER; note = 2'-O-methyladenosine-3'-phosphate
  modified_base 14: mod_base = OTHER; note = 2'-deoxy-2'-fluoroadenosine-3'-phosphate
  modified_base 15: mod_base = OTHER; note = 2'-O-methylcytidine-3'-phosphate
  modified_base 16: mod_base = OTHER; note = 2'-deoxy-2'-fluoroadenosine-3'-phosphate
  modified_base 17: mod_base = OTHER; note = 2'-O-methylcytidine-3'-phosphate
  modified_base 18: mod_base = OTHER; note = 2'-deoxy-2'-fluorouridine-3'-phosphate
  modified_base 19: mod_base = OTHER; note = 2'-O-methylguanosine-3'-phosphate
  modified_base 20: mod_base = OTHER; note = 2'-deoxy-2'-fluorouridine-3'-phosphate
  modified_base 21: mod_base = OTHER; note = 2'-O-methyluridine-3'-phosphorothioate
  modified_base 22: mod_base = OTHER; note = 2'-O-methyluridine-3'-phosphorothioate
  modified_base 23: mod_base = OTHER; note = 2'-O-methyluridine
ttatagagcaagaacactgtttt

SEQ ID NO: 212 - RNA, 23 nt, synthetic construct
  source 1..23: mol_type = other RNA
  modified_base 1: mod_base = OTHER; note = 2'-O-methyluridine-3'-phosphorothioate
  modified_base 2: mod_base = OTHER; note = 2'-deoxy-2'-fluorouridine-3'-phosphorothioate
  modified_base 3: mod_base = OTHER; note = 2'-O-methyladenosine-3'-phosphate
  modified_base 4: mod_base = OTHER; note = 2'-deoxy-2'-fluorouridine-3'-phosphate
  modified_base 5: mod_base = OTHER; note = 2'-O-methyladenosine-3'-phosphate
  modified_base 6: mod_base = OTHER; note = 2'-deoxy-2'-fluoroguanosine-3'-phosphate
  modified_base 7: mod_base = OTHER; note = 2'-O-methyladenosine-3'-phosphate
  modified_base 8: mod_base = OTHER; note = 2'-deoxy-2'-fluoroguanosine-3'-phosphate
  modified_base 9: mod_base = OTHER; note = 2'-O-methylcytidine-3'-phosphate
  modified_base 10: mod_base = OTHER; note = 2'-deoxy-2'-fluoroadenosine-3'-phosphate
  modified_base 11: mod_base = OTHER; note = 2'-O-methyladenosine-3'-phosphate
  modified_base 12: mod_base = OTHER; note = 2'-O-methylguanosine-3'-phosphate
  modified_base 13: mod_base = OTHER; note = 4'-(R)-methyl-9-(alpha-L-threofuranosyl)adenine 2'-phosphate
  modified_base 14: mod_base = OTHER; note = 2'-deoxy-2'-fluoroadenosine-3'-phosphate
  modified_base 15: mod_base = OTHER; note = 2'-O-methylcytidine-3'-phosphate
  modified_base 16: mod_base = OTHER; note = 2'-deoxy-2'-fluoroadenosine-3'-phosphate
  modified_base 17: mod_base = OTHER; note = 2'-O-methylcytidine-3'-phosphate
  modified_base 18: mod_base = OTHER; note = 2'-deoxy-2'-fluorouridine-3'-phosphate
  modified_base 19: mod_base = OTHER; note = 2'-O-methylguanosine-3'-phosphate
  modified_base 20: mod_base = OTHER; note = 2'-deoxy-2'-fluorouridine-3'-phosphate
  modified_base 21: mod_base = OTHER; note = 2'-O-methyluridine-3'-phosphorothioate
  modified_base 22: mod_base = OTHER; note = 2'-O-methyluridine-3'-phosphorothioate
  modified_base 23: mod_base = OTHER; note = 2'-O-methyluridine
ttatagagcaagaacactgtttt

SEQ ID NO: 213 - RNA, 23 nt, synthetic construct
  source 1..23: mol_type = other RNA
  modified_base 1: mod_base = OTHER; note = 2'-O-methyluridine-3'-phosphorothioate
  modified_base 2: mod_base = OTHER; note = 2'-deoxy-2'-fluorouridine-3'-phosphorothioate
  modified_base 3: mod_base = OTHER; note = 2'-O-methyladenosine-3'-phosphate
  modified_base 4: mod_base = OTHER; note = 2'-deoxy-2'-fluorouridine-3'-phosphate
  modified_base 5: mod_base = OTHER; note = 2'-O-methyladenosine-3'-phosphate
  modified_base 6: mod_base = OTHER; note = 2'-deoxy-2'-fluoroguanosine-3'-phosphate
  modified_base 7: mod_base = OTHER; note = 2'-O-methyladenosine-3'-phosphate
  modified_base 8: mod_base = OTHER; note = 2'-deoxy-2'-fluoroguanosine-3'-phosphate
  modified_base 9: mod_base = OTHER; note = 2'-O-methylcytidine-3'-phosphate
  modified_base 10: mod_base = OTHER; note = 2'-deoxy-2'-fluoroadenosine-3'-phosphate
  modified_base 11: mod_base = OTHER; note = 2'-O-methyladenosine-3'-phosphate
  modified_base 12: mod_base = OTHER; note = 2'-O-methylguanosine-3'-phosphate
  modified_base 13: mod_base = OTHER; note = 2'-O-methyladenosine-3'-phosphate
  modified_base 14: mod_base = OTHER; note = 4'-(R)-methyl-9-(alpha-L-threofuranosyl)adenine 2'-phosphate
  modified_base 15: mod_base = OTHER; note = 2'-O-methylcytidine-3'-phosphate
  modified_base 16: mod_base = OTHER; note = 2'-deoxy-2'-fluoroadenosine-3'-phosphate
  modified_base 17: mod_base = OTHER; note = 2'-O-methylcytidine-3'-phosphate
  modified_base 18: mod_base = OTHER; note = 2'-deoxy-2'-fluorouridine-3'-phosphate
  modified_base 19: mod_base = OTHER; note = 2'-O-methylguanosine-3'-phosphate
  modified_base 20: mod_base = OTHER; note = 2'-deoxy-2'-fluorouridine-3'-phosphate
  modified_base 21: mod_base = OTHER; note = 2'-O-methyluridine-3'-phosphorothioate
  modified_base 22: mod_base = OTHER; note = 2'-O-methyluridine-3'-phosphorothioate
  modified_base 23: mod_base = OTHER; note = 2'-O-methyluridine
ttatagagcaagaacactgtttt

SEQ ID NO: 214 - RNA, 23 nt, synthetic construct
  source 1..23: mol_type = other RNA
  modified_base 1: mod_base = OTHER; note = 2'-O-methyluridine-3'-phosphorothioate
  modified_base 2: mod_base = OTHER; note = 2'-deoxy-2'-fluorouridine-3'-phosphorothioate
  modified_base 3: mod_base = OTHER; note = 2'-O-methyladenosine-3'-phosphate
  modified_base 4: mod_base = OTHER; note = 2'-deoxy-2'-fluorouridine-3'-phosphate
  modified_base 5: mod_base = OTHER; note = 2'-O-methyladenosine-3'-phosphate
  modified_base 6: mod_base = OTHER; note = 2'-deoxy-2'-fluoroguanosine-3'-phosphate
  modified_base 7: mod_base = OTHER; note = 2'-O-methyladenosine-3'-phosphate
  modified_base 8: mod_base = OTHER; note = 2'-deoxy-2'-fluoroguanosine-3'-phosphate
  modified_base 9: mod_base = OTHER; note = 2'-O-methylcytidine-3'-phosphate
  modified_base 10: mod_base = OTHER; note = 2'-deoxy-2'-fluoroadenosine-3'-phosphate
  modified_base 11: mod_base = OTHER; note = 2'-O-methyladenosine-3'-phosphate
  modified_base 12: mod_base = OTHER; note = 2'-O-methylguanosine-3'-phosphate
  modified_base 13: mod_base = OTHER; note = 2'-O-methyladenosine-3'-phosphate
  modified_base 14: mod_base = OTHER; note = 2'-deoxy-2'-fluoroadenosine-3'-phosphate
  modified_base 15: mod_base = OTHER; note = 4'-(R)-methyl-1-(alpha-L-threofuranosyl)cytosine 2'-phosphate
  modified_base 16: mod_base = OTHER; note = 2'-deoxy-2'-fluoroadenosine-3'-phosphate
  modified_base 17: mod_base = OTHER; note = 2'-O-methylcytidine-3'-phosphate
  modified_base 18: mod_base = OTHER; note = 2'-deoxy-2'-fluorouridine-3'-phosphate
  modified_base 19: mod_base = OTHER; note = 2'-O-methylguanosine-3'-phosphate
  modified_base 20: mod_base = OTHER; note = 2'-deoxy-2'-fluorouridine-3'-phosphate
  modified_base 21: mod_base = OTHER; note = 2'-O-methyluridine-3'-phosphorothioate
  modified_base 22: mod_base = OTHER; note = 2'-O-methyluridine-3'-phosphorothioate
  modified_base 23: mod_base = OTHER; note = 2'-O-methyluridine
ttatagagcaagaacactgtttt

SEQ ID NO: 215 - RNA, 23 nt, synthetic construct
  source 1..23: mol_type = other RNA
  modified_base 1: mod_base = OTHER; note = 2'-O-methyluridine-3'-phosphorothioate
  modified_base 2: mod_base = OTHER; note = 2'-deoxy-2'-fluorouridine-3'-phosphorothioate
  modified_base 3: mod_base = OTHER; note = 2'-O-methyladenosine-3'-phosphate
  modified_base 4: mod_base = OTHER; note = 2'-deoxy-2'-fluorouridine-3'-phosphate
  modified_base 5: mod_base = OTHER; note = 2'-O-methyladenosine-3'-phosphate
  modified_base 6: mod_base = OTHER; note = 2'-deoxy-2'-fluoroguanosine-3'-phosphate
  modified_base 7: mod_base = OTHER; note = 2'-O-methyladenosine-3'-phosphate
  modified_base 8: mod_base = OTHER; note = 2'-deoxy-2'-fluoroguanosine-3'-phosphate
  modified_base 9: mod_base = OTHER; note = 2'-O-methylcytidine-3'-phosphate
  modified_base 10: mod_base = OTHER; note = 2'-deoxy-2'-fluoroadenosine-3'-phosphate
  modified_base 11: mod_base = OTHER; note = 2'-O-methyladenosine-3'-phosphate
  modified_base 12: mod_base = OTHER; note = 2'-O-methylguanosine-3'-phosphate
  modified_base 13: mod_base = OTHER; note = 2'-O-methyladenosine-3'-phosphate
  modified_base 14: mod_base = OTHER; note = 2'-deoxy-2'-fluoroadenosine-3'-phosphate
  modified_base 15: mod_base = OTHER; note = 2'-O-methylcytidine-3'-phosphate
  modified_base 16: mod_base = OTHER; note = 4'-(R)-methyl-9-(alpha-L-threofuranosyl)adenine 2'-phosphate
  modified_base 17: mod_base = OTHER; note = 2'-O-methylcytidine-3'-phosphate
  modified_base 18: mod_base = OTHER; note = 2'-deoxy-2'-fluorouridine-3'-phosphate
  modified_base 19: mod_base = OTHER; note = 2'-O-methylguanosine-3'-phosphate
  modified_base 20: mod_base = OTHER; note = 2'-deoxy-2'-fluorouridine-3'-phosphate
  modified_base 21: mod_base = OTHER; note = 2'-O-methyluridine-3'-phosphorothioate
  modified_base 22: mod_base = OTHER; note = 2'-O-methyluridine-3'-phosphorothioate
  modified_base 23: mod_base = OTHER; note = 2'-O-methyluridine
ttatagagcaagaacactgtttt

SEQ ID NO: 216 - RNA, 23 nt, synthetic construct
  source 1..23: mol_type = other RNA
  modified_base 1: mod_base = OTHER; note = 2'-O-methyluridine-3'-phosphorothioate
  modified_base 2: mod_base = OTHER; note = 2'-deoxy-2'-fluorouridine-3'-phosphorothioate
  modified_base 3: mod_base = OTHER; note = 2'-O-methyladenosine-3'-phosphate
  modified_base 4: mod_base = OTHER; note = 2'-deoxy-2'-fluorouridine-3'-phosphate
  modified_base 5: mod_base = OTHER; note = 2'-O-methyladenosine-3'-phosphate
  modified_base 6: mod_base = OTHER; note = 2'-deoxy-2'-fluoroguanosine-3'-phosphate
  modified_base 7: mod_base = OTHER; note = 2'-O-methyladenosine-3'-phosphate
  modified_base 8: mod_base = OTHER; note = 2'-deoxy-2'-fluoroguanosine-3'-phosphate
  modified_base 9: mod_base = OTHER; note = 2'-O-methylcytidine-3'-phosphate
  modified_base 10: mod_base = OTHER; note = 2'-deoxy-2'-fluoroadenosine-3'-phosphate
  modified_base 11: mod_base = OTHER; note = 2'-O-methyladenosine-3'-phosphate
  modified_base 12: mod_base = OTHER; note = 2'-O-methylguanosine-3'-phosphate
  modified_base 13: mod_base = OTHER; note = 2'-O-methyladenosine-3'-phosphate
  modified_base 14: mod_base = OTHER; note = 2'-deoxy-2'-fluoroadenosine-3'-phosphate
  modified_base 15: mod_base = OTHER; note = 2'-O-methylcytidine-3'-phosphate
  modified_base 16: mod_base = OTHER; note = 2'-deoxy-2'-fluoroadenosine-3'-phosphate
  modified_base 17: mod_base = OTHER; note = 4'-(R)-methyl-1-(alpha-L-threofuranosyl)cytosine 2'-phosphate
  modified_base 18: mod_base = OTHER; note = 2'-deoxy-2'-fluorouridine-3'-phosphate
  modified_base 19: mod_base = OTHER; note = 2'-O-methylguanosine-3'-phosphate
  modified_base 20: mod_base = OTHER; note = 2'-deoxy-2'-fluorouridine-3'-phosphate
  modified_base 21: mod_base = OTHER; note = 2'-O-methyluridine-3'-phosphorothioate
  modified_base 22: mod_base = OTHER; note = 2'-O-methyluridine-3'-phosphorothioate
  modified_base 23: mod_base = OTHER; note = 2'-O-methyluridine
ttatagagcaagaacactgtttt

SEQ ID NO: 217 - RNA, 23 nt, synthetic construct
  source 1..23: mol_type = other RNA
  modified_base 1: mod_base = OTHER; note = 2'-O-methyluridine-3'-phosphorothioate
  modified_base 2: mod_base = OTHER; note = 2'-deoxy-2'-fluorouridine-3'-phosphorothioate
  modified_base 3: mod_base = OTHER; note = 2'-O-methyladenosine-3'-phosphate
  modified_base 4: mod_base = OTHER; note = 2'-deoxy-2'-fluorouridine-3'-phosphate
  modified_base 5: mod_base = OTHER; note = 2'-O-methyladenosine-3'-phosphate
  modified_base 6: mod_base = OTHER; note = 2'-deoxy-2'-fluoroguanosine-3'-phosphate
  modified_base 7: mod_base = OTHER; note = 2'-O-methyladenosine-3'-phosphate
  modified_base 8: mod_base = OTHER; note = 2'-deoxy-2'-fluoroguanosine-3'-phosphate
  modified_base 9: mod_base = OTHER; note = 2'-O-methylcytidine-3'-phosphate
  modified_base 10: mod_base = OTHER; note = 2'-deoxy-2'-fluoroadenosine-3'-phosphate
  modified_base 11: mod_base = OTHER; note = 2'-O-methyladenosine-3'-phosphate
  modified_base 12: mod_base = OTHER; note = 2'-O-methylguanosine-3'-phosphate
  modified_base 13: mod_base = OTHER; note = 2'-O-methyladenosine-3'-phosphate
  modified_base 14: mod_base = OTHER; note = 2'-deoxy-2'-fluoroadenosine-3'-phosphate
  modified_base 15: mod_base = OTHER; note = 2'-O-methylcytidine-3'-phosphate
  modified_base 16: mod_base = OTHER; note = 2'-deoxy-2'-fluoroadenosine-3'-phosphate
  modified_base 17: mod_base = OTHER; note = 2'-O-methylcytidine-3'-phosphate
  modified_base 18: mod_base = OTHER; note = 4'-(R)-methyl-1-(alpha-L-threofuranosyl)thymine 2'-phosphate
  modified_base 19: mod_base = OTHER; note = 2'-O-methylguanosine-3'-phosphate
  modified_base 20: mod_base = OTHER; note = 2'-deoxy-2'-fluorouridine-3'-phosphate
  modified_base 21: mod_base = OTHER; note = 2'-O-methyluridine-3'-phosphorothioate
  modified_base 22: mod_base = OTHER; note = 2'-O-methyluridine-3'-phosphorothioate
  modified_base 23: mod_base = OTHER; note = 2'-O-methyluridine
ttatagagcaagaacactgtttt

SEQ ID NO: 218 - RNA, 23 nt, synthetic construct
  source 1..23: mol_type = other RNA
  modified_base 1: mod_base = OTHER; note = 2'-O-methyluridine-3'-phosphorothioate
  modified_base 2: mod_base = OTHER; note = 2'-deoxy-2'-fluorouridine-3'-phosphorothioate
  modified_base 3: mod_base = OTHER; note = 2'-O-methyladenosine-3'-phosphate
  modified_base 4: mod_base = OTHER; note = 2'-deoxy-2'-fluorouridine-3'-phosphate
  modified_base 5: mod_base = OTHER; note = 2'-O-methyladenosine-3'-phosphate
  modified_base 6: mod_base = OTHER; note = 2'-deoxy-2'-fluoroguanosine-3'-phosphate
  modified_base 7: mod_base = OTHER; note = 2'-O-methyladenosine-3'-phosphate
  modified_base 8: mod_base = OTHER; note = 2'-deoxy-2'-fluoroguanosine-3'-phosphate
  modified_base 9: mod_base = OTHER; note = 2'-O-methylcytidine-3'-phosphate
  modified_base 10: mod_base = OTHER; note = 2'-deoxy-2'-fluoroadenosine-3'-phosphate
  modified_base 11: mod_base = OTHER; note = 2'-O-methyladenosine-3'-phosphate
  modified_base 12: mod_base = OTHER; note = 2'-O-methylguanosine-3'-phosphate
  modified_base 13: mod_base = OTHER; note = 2'-O-methyladenosine-3'-phosphate
  modified_base 14: mod_base = OTHER; note = 2'-deoxy-2'-fluoroadenosine-3'-phosphate
  modified_base 15: mod_base = OTHER; note = 2'-O-methylcytidine-3'-phosphate
  modified_base 16: mod_base = OTHER; note = 2'-deoxy-2'-fluoroadenosine-3'-phosphate
  modified_base 17: mod_base = OTHER; note = 2'-O-methylcytidine-3'-phosphate
  modified_base 18: mod_base = OTHER; note = 2'-deoxy-2'-fluorouridine-3'-phosphate
  modified_base 19: mod_base = OTHER; note = 4'-(R)-methyl-9-(alpha-L-threofuranosyl)guanine 2'-phosphate
  modified_base 20: mod_base = OTHER; note = 2'-deoxy-2'-fluorouridine-3'-phosphate
  modified_base 21: mod_base = OTHER; note = 2'-O-methyluridine-3'-phosphorothioate
  modified_base 22: mod_base = OTHER; note = 2'-O-methyluridine-3'-phosphorothioate
  modified_base 23: mod_base = OTHER; note = 2'-O-methyluridine
ttatagagcaagaacactgtttt

SEQ ID NO: 219 - RNA, 23 nt, synthetic construct
  source 1..23: mol_type = other RNA
  modified_base 1: mod_base = OTHER; note = 2'-O-methyluridine-3'-phosphorothioate
  modified_base 2: mod_base = OTHER; note = 2'-deoxy-2'-fluorouridine-3'-phosphorothioate
  modified_base 3: mod_base = OTHER; note = 2'-O-methyladenosine-3'-phosphate
  modified_base 4: mod_base = OTHER; note = 2'-deoxy-2'-fluorouridine-3'-phosphate
  modified_base 5: mod_base = OTHER; note = 2'-O-methyladenosine-3'-phosphate
  modified_base 6: mod_base = OTHER; note = 2'-deoxy-2'-fluoroguanosine-3'-phosphate
  modified_base 7: mod_base = OTHER; note = 2'-O-methyladenosine-3'-phosphate
  modified_base 8: mod_base = OTHER; note = 2'-deoxy-2'-fluoroguanosine-3'-phosphate
  modified_base 9: mod_base = OTHER; note = 2'-O-methylcytidine-3'-phosphate
  modified_base 10: mod_base = OTHER; note = 2'-deoxy-2'-fluoroadenosine-3'-phosphate
  modified_base 11: mod_base = OTHER; note = 2'-O-methyladenosine-3'-phosphate
  modified_base 12: mod_base = OTHER; note = 2'-O-methylguanosine-3'-phosphate
  modified_base 13: mod_base = OTHER; note = 2'-O-methyladenosine-3'-phosphate
  modified_base 14: mod_base = OTHER; note = 2'-deoxy-2'-fluoroadenosine-3'-phosphate
  modified_base 15: mod_base = OTHER; note = 2'-O-methylcytidine-3'-phosphate
  modified_base 16: mod_base = OTHER; note = 2'-deoxy-2'-fluoroadenosine-3'-phosphate
  modified_base 17: mod_base = OTHER; note = 2'-O-methylcytidine-3'-phosphate
  modified_base 18: mod_base = OTHER; note = 2'-deoxy-2'-fluorouridine-3'-phosphate
  modified_base 19: mod_base = OTHER; note = 2'-O-methylguanosine-3'-phosphate
  modified_base 20: mod_base = OTHER; note = 4'-(R)-methyl-1-(alpha-L-threofuranosyl)thymine 2'-phosphate
  modified_base 21: mod_base = OTHER; note = 2'-O-methyluridine-3'-phosphorothioate
  modified_base 22: mod_base = OTHER; note = 2'-O-methyluridine-3'-phosphorothioate
  modified_base 23: mod_base = OTHER; note = 2'-O-methyluridine
ttatagagcaagaacactgtttt

SEQ ID NO: 220 - RNA, 23 nt, synthetic construct
  source 1..23: mol_type = other RNA
  modified_base 1: mod_base = OTHER; note = 2'-O-methyluridine-3'-phosphorothioate
  modified_base 2: mod_base = OTHER; note = 2'-deoxy-2'-fluorouridine-3'-phosphorothioate
  modified_base 3: mod_base = OTHER; note = 2'-O-methyladenosine-3'-phosphate
  modified_base 4: mod_base = OTHER; note = 2'-deoxy-2'-fluorouridine-3'-phosphate
  modified_base 5: mod_base = OTHER; note = 2'-O-methyladenosine-3'-phosphate
  modified_base 6: mod_base = OTHER; note = 2'-deoxy-2'-fluoroguanosine-3'-phosphate
  modified_base 7: mod_base = OTHER; note = 2'-O-methyladenosine-3'-phosphate
  modified_base 8: mod_base = OTHER; note = 2'-deoxy-2'-fluoroguanosine-3'-phosphate
  modified_base 9: mod_base = OTHER; note = 2'-O-methylcytidine-3'-phosphate
  modified_base 10: mod_base = OTHER; note = 2'-deoxy-2'-fluoroadenosine-3'-phosphate
  modified_base 11: mod_base = OTHER; note = 2'-O-methyladenosine-3'-phosphate
  modified_base 12: mod_base = OTHER; note = 2'-O-methylguanosine-3'-phosphate
  modified_base 13: mod_base = OTHER; note = 2'-O-methyladenosine-3'-phosphate
  modified_base 14: mod_base = OTHER; note = 2'-deoxy-2'-fluoroadenosine-3'-phosphate
  modified_base 15: mod_base = OTHER; note = 2'-O-methylcytidine-3'-phosphate
  modified_base 16: mod_base = OTHER; note = 2'-deoxy-2'-fluoroadenosine-3'-phosphate
  modified_base 17: mod_base = OTHER; note = 2'-O-methylcytidine-3'-phosphate
  modified_base 18: mod_base = OTHER; note = 2'-deoxy-2'-fluorouridine-3'-phosphate
  modified_base 19: mod_base = OTHER; note = 2'-O-methylguanosine-3'-phosphate
  modified_base 20: mod_base = OTHER; note = 2'-deoxy-2'-fluorouridine-3'-phosphate
  modified_base 21: mod_base = OTHER; note = 4'-(R)-methyl-1-(alpha-L-threofuranosyl)thymine 2'- phosphorothioate
  modified_base 22: mod_base = OTHER; note = 2'-O-methyluridine-3'-phosphorothioate
  modified_base 23: mod_base = OTHER; note = 2'-O-methyluridine
ttatagagcaagaacactgtttt

SEQ ID NO: 221 - RNA, 23 nt, synthetic construct
  source 1..23: mol_type = other RNA
  modified_base 1: mod_base = OTHER; note = 2'-O-methyluridine-3'-phosphorothioate
  modified_base 2: mod_base = OTHER; note = 2'-deoxy-2'-fluorouridine-3'-phosphorothioate
  modified_base 3: mod_base = OTHER; note = 2'-O-methyladenosine-3'-phosphate
  modified_base 4: mod_base = OTHER; note = 2'-deoxy-2'-fluorouridine-3'-phosphate
  modified_base 5: mod_base = OTHER; note = 2'-O-methyladenosine-3'-phosphate
  modified_base 6: mod_base = OTHER; note = 2'-deoxy-2'-fluoroguanosine-3'-phosphate
  modified_base 7: mod_base = OTHER; note = 2'-O-methyladenosine-3'-phosphate
  modified_base 8: mod_base = OTHER; note = 2'-deoxy-2'-fluoroguanosine-3'-phosphate
  modified_base 9: mod_base = OTHER; note = 2'-O-methylcytidine-3'-phosphate
  modified_base 10: mod_base = OTHER; note = 2'-deoxy-2'-fluoroadenosine-3'-phosphate
  modified_base 11: mod_base = OTHER; note = 2'-O-methyladenosine-3'-phosphate
  modified_base 12: mod_base = OTHER; note = 2'-O-methylguanosine-3'-phosphate
  modified_base 13: mod_base = OTHER; note = 2'-O-methyladenosine-3'-phosphate
  modified_base 14: mod_base = OTHER; note = 2'-deoxy-2'-fluoroadenosine-3'-phosphate
  modified_base 15: mod_base = OTHER; note = 2'-O-methylcytidine-3'-phosphate
  modified_base 16: mod_base = OTHER; note = 2'-deoxy-2'-fluoroadenosine-3'-phosphate
  modified_base 17: mod_base = OTHER; note = 2'-O-methylcytidine-3'-phosphate
  modified_base 18: mod_base = OTHER; note = 2'-deoxy-2'-fluorouridine-3'-phosphate
  modified_base 19: mod_base = OTHER; note = 2'-O-methylguanosine-3'-phosphate
  modified_base 20: mod_base = OTHER; note = 2'-deoxy-2'-fluorouridine-3'-phosphate
  modified_base 21: mod_base = OTHER; note = 2'-O-methyluridine-3'-phosphorothioate
  modified_base 22: mod_base = OTHER; note = 4'-(R)-methyl-1-(alpha-L-threofuranosyl)thymine 2'- phosphorothioate
  modified_base 23: mod_base = OTHER; note = 2'-O-methyluridine
ttatagagcaagaacactgtttt

SEQ ID NO: 222 - RNA, 23 nt, synthetic construct
  source 1..23: mol_type = other RNA
  modified_base 1: mod_base = OTHER; note = 2'-O-methyluridine-3'-phosphorothioate
  modified_base 2: mod_base = OTHER; note = 2'-deoxy-2'-fluorouridine-3'-phosphorothioate
  modified_base 3: mod_base = OTHER; note = 2'-O-methyladenosine-3'-phosphate
  modified_base 4: mod_base = OTHER; note = 2'-deoxy-2'-fluorouridine-3'-phosphate
  modified_base 5: mod_base = OTHER; note = 2'-O-methyladenosine-3'-phosphate
  modified_base 6: mod_base = OTHER; note = 2'-deoxy-2'-fluoroguanosine-3'-phosphate
  modified_base 7: mod_base = OTHER; note = 2'-O-methyladenosine-3'-phosphate
  modified_base 8: mod_base = OTHER; note = 2'-deoxy-2'-fluoroguanosine-3'-phosphate
  modified_base 9: mod_base = OTHER; note = 2'-O-methylcytidine-3'-phosphate
  modified_base 10: mod_base = OTHER; note = 2'-deoxy-2'-fluoroadenosine-3'-phosphate
  modified_base 11: mod_base = OTHER; note = 2'-O-methyladenosine-3'-phosphate
  modified_base 12: mod_base = OTHER; note = 2'-O-methylguanosine-3'-phosphate
  modified_base 13: mod_base = OTHER; note = 2'-O-methyladenosine-3'-phosphate
  modified_base 14: mod_base = OTHER; note = 2'-deoxy-2'-fluoroadenosine-3'-phosphate
  modified_base 15: mod_base = OTHER; note = 2'-O-methylcytidine-3'-phosphate
  modified_base 16: mod_base = OTHER; note = 2'-deoxy-2'-fluoroadenosine-3'-phosphate
  modified_base 17: mod_base = OTHER; note = 2'-O-methylcytidine-3'-phosphate
  modified_base 18: mod_base = OTHER; note = 2'-deoxy-2'-fluorouridine-3'-phosphate
  modified_base 19: mod_base = OTHER; note = 2'-O-methylguanosine-3'-phosphate
  modified_base 20: mod_base = OTHER; note = 2'-deoxy-2'-fluorouridine-3'-phosphate
  modified_base 21: mod_base = OTHER; note = 2'-O-methyluridine-3'-phosphorothioate
  modified_base 22: mod_base = OTHER; note = 2'-O-methyluridine-3'-phosphorothioate
  modified_base 23: mod_base = OTHER; note = 4'-(R)-methyl-1-(alpha-L-threofuranosyl)thymine
ttatagagcaagaacactgtttt

1. A double-stranded RNA (dsRNA) agent capable of modulating the expression of a target gene, comprising a sense strand and an antisense strand sufficiently complementary to at least one portion of a mRNA of the target gene, each strand having 14 to 40 nucleotides, wherein:
the sense strand comprises at least one 2′-OMe modification at position 1, counting from the 5′ end; and
the antisense strand comprises at least one TNA (threose nucleic acid) at position 1, counting from the 5′ end.

2. The dsRNA agent of claim 1, wherein the sense strand further comprises at least one 2′-OMe modification at position 2, counting from the 5′ end.

3. The dsRNA agent of claim 1, wherein the dsRNA agent contains one or more ligands conjugated to at least one strand, optionally via a linker or carrier.

4. A double-stranded RNA (dsRNA) agent capable of modulating the expression of a target gene, comprising a sense strand and an antisense strand sufficiently complementary to at least one portion of a mRNA of the target gene, each strand having 14 to 40 nucleotides, wherein:
one of the sense or antisense strand comprises at least one 4′-modified TNA (threose nucleic acid) having the structure of [chemical structure]
wherein:
each R is independently an optionally substituted alkyl,
B is an optionally modified nucleobase, and
* represents the bond to H or to the internucleotide linkage to the subsequent nucleotide.

5. The dsRNA agent of claim 4, wherein the dsRNA agent contains one or more ligands conjugated to at least one strand, optionally via a linker or carrier, wherein at least one ligand is a lipophilic moiety.

6. (canceled)

7. The dsRNA agent of claim 5, wherein at least one ligand is an ASGPR ligand.

8-9. (canceled)

10. The double-stranded RNA (dsRNA) agent of claim 1, wherein
one or more lipophilic moieties are conjugated to at least one strand, optionally via a linker or carrier.

11-13. (canceled)

14. The dsRNA agent of claim 5, wherein the lipophilic moiety:
(i) is lipid, cholesterol, retinoic acid, cholic acid, adamantane acetic acid, 1-pyrene butyric acid, dihydrotestosterone, 1,3-bis-O(hexadecyl)glycerol, geranyloxyhexyanol, hexadecylglycerol, borneol, menthol, 1,3-propanediol, heptadecyl group, palmitic acid, myristic acid, O3-(oleoyl)lithocholic acid, O3-(oleoyl)cholenic acid, dimethoxytrityl, or phenoxazine,
(ii) contains a saturated or unsaturated C₄-C₃₀ hydrocarbon chain, and an optional functional group selected from the group consisting of hydroxyl, amine, carboxylic acid, sulfonate, phosphate, thiol, azide, and alkyne: or
(iii) is selected from the group consisting of: [chemical structure] [chemical structure] [chemical structure] [chemical structure] [chemical structure] [chemical structure] [chemical structure]
wherein:
m is an integer of 0-8:
n is an integer of 1-21:
R₂′ is H, OH, F, OMe, O-methoxyalkyl, O-allyl, O—N-methylacetamido, O-dimethylaminoethoxyethyl, or O-aminopropyl;
B is a modified or unmodified nucleobase;
W is an alkyl; and
R and R′ are each independently H or alkyl.

15. (canceled)

16. The dsRNA agent of claim 14, wherein the lipophilic moiety contains a saturated or unsaturated C₄-C₁₈ hydrocarbon chain, and wherein one or more lipophilic moieties are conjugated to one or more of the following internal positions: positions 4-8 and 13-18 on the sense strand, and positions 6-10 and 15-18 on the antisense strand, counting from the 5′ end of each strand.

17. (canceled)

18. The dsRNA agent of claim 5, further comprising a targeting ligand that targets a receptor which mediates delivery to a CNS tissue or an ocular tissue,
wherein the targeting ligand is selected from the group consisting of Angiopep-2, lipoprotein receptor related protein (LRP) ligand, bEnd.3 cell binding ligand, transferrin receptor (TfR) ligand, manose receptor ligand, glucose transporter protein, and LDL receptor ligand, or
wherein the targeting ligand is selected from the group consisting of trans-retinol, RGD peptide, LDL receptor ligand, and carbohydrate based ligands.

19-21. (canceled)

22. The dsRNA agent of claim 1, wherein the TNA has the structure of: [chemical structure]
wherein each R is independently an optionally substituted alkyl, B is an optionally modified nucleobase, and * represents the bond to the internucleotide linkage to the subsequent nucleotide.

23-31. (canceled)

32. The dsRNA agent of claim 22, wherein B is one of the following:

[chemical structure]

[chemical structure]

[chemical structure]

[chemical structure]

[chemical structure]

33. The dsRNA agent of claim 22, wherein B is [chemical structure]
wherein R^{b} is a lipophilic moiety, optionally containing a saturated or unsaturated C₄-C₃₀ hydrocarbon chain, a carbohydrate, a folate, or a glutamate urea (PUPA).

34. (canceled)

35. The dsRNA agent of claim 33, wherein R^{b} is one of the following: [chemical structure] [chemical structure] [chemical structure] [chemical structure]
R^{b} has a formula of [chemical structure]
wherein
s is 1-10, and
Ln is one of the following:

[chemical structure]

36. (canceled)

37. The dsRNA agent of claim 22, wherein at least one TNA has a structure of [chemical structure]
wherein:
(i) R is methyl substituted with hydroxyl, alkoxy, or alkoxyalkoxy,
(ii) R is C₁-C₃ alkyl substituted with one or more halogen groups,
(iii) R is methyl substituted with an alkenyl or alkynyl,
(iv) R is methyl substituted with a triazoryl group, wherein the triazoryl group has a N atom optionally substituted with one or more of C(O), N(H), alkyl, alkenyl, alkynyl, aryl, heteroaryl, a lipophilic moiety, a carbohydrate, and/or a vitamin, or
(v) R is methyl substituted with an amino group, optionally substituted with one or more of C(O), N(H), halogen, alkyl, alkenyl, alkynyl, aryl, heteroaryl, a lipophilic moiety, a carbohydrate, and/or a vitamin,
and wherein R is in (R) or (S) configuration.

38. The dsRNA agent of claim 37, wherein the TNA is a 4′-modified TNA having the structure of [chemical structure]
wherein:
R₁ is one of the following: [chemical structure] [chemical structure] [chemical structure] [chemical structure] [chemical structure] [chemical structure] [chemical structure] [chemical structure]
and
n is 1-10, or [chemical structure]
wherein R₁ is one of the following:

[chemical structure]

[chemical structure]

39-47. (canceled)

48. The dsRNA agent of claim 22, wherein at least one TNA is a 4′-modified TNA having a structure of [chemical structure]
wherein R is methyl, and wherein:
(i) R is in (S) configuration, wherein at least one 4′-modified TNA is at one of positions 1-9 and 12-15 of the sense strand, counting from the 5′ end of the sense strand;
(ii) R is in (S) configuration, wherein at least one 4′-modified TNA is at one of positions 3, 5-11, 14, 16, 18, and 20 of the antisense strand, counting from the 5′ end of the antisense strand;
(iii) R is in (R) configuration, wherein at least one 4′-modified TNA is at one of positions 1-10 and 12-21 of the sense strand, counting from the 5′ end of the sense strand; or
(iv) R is in (R) configuration, wherein at least one 4′-modified TNA is at one of positions 2-10, 19-21, and 23 of the antisense strand, counting from the 5′ end of the antisense strand.

49-52. (canceled)

53. The dsRNA agent of claim 1, wherein the internucleotide linkage between the nucleotides at position 1 and position 2 of the 5′ end of the antisense strand is not a phosphorothioate linkage.

54. The dsRNA agent of claim 1, wherein the 5′ end of the antisense strand does not contain a phosphate or phosphate mimic.

55. The dsRNA agent of claim 1, wherein the sense and antisense strands are each 19 to 25 nucleotides in length; wherein the dsRNA agent comprises a single-stranded overhang of 1, 2 or 3 nucleotides in length on one of the termini, and a blunt end on the other termini.

56. The dsRNA agent of claim 55, wherein the sense strand is 21 nucleotides in length, and the antisense strand is 23 nucleotides in length, wherein the strands form a double-stranded region of 21 consecutive base pairs having a 2-nucleotide long single-stranded overhangs at the 3′-end.

57-58. (canceled)

59. The dsRNA agent of claim 1, wherein:
the sense strand comprises at least two phosphorothioate internucleotide linkages between the first five nucleotides counting from the 5′ end of the sense strand;
the antisense strand comprises at least two phosphorothioate internucleotide linkages between the first five nucleotides counting from the 3′ end of the antisense strand; and/or
the antisense strand comprises at least two phosphorothioate internucleotide linkages between the first five nucleotides counting from the 5′ end of the antisense strand.

60-61. (canceled)

62. The dsRNA agent of claim 1, wherein at least one strand comprises one or more phosphorodithioates (PS₂) linkages.

63-64. (canceled)

65. A method of modulating the expression of a target gene in a cell, comprising administering to said cell, the dsRNA agent of claim 1, wherein the cell is within a subject, and wherein the cell is a hepatic cell or an extrahepatic cell.

66-68. (canceled)

69. The method of claim 65, wherein the dsRNA agent is administered intrathecally or intravitreally, and wherein the method reduces the expression of a target gene in a brain or spine tissue, or in an ocular tissue.

70-74. (canceled)

75. A method of treating a subject having a CNS disorder, comprising:
administering to the subject, optionally extrahepatically, a therapeutically effective amount of a double stranded RNA (dsRNA) agent capable of modulating the expression of a target gene, thereby treating the subject,
wherein the dsRNA agent comprises a sense strand and an antisense strand sufficiently complementary to at least one portion of a mRNA of the target gene, each strand having 14 to 40 nucleotides, and wherein the antisense strand comprises at least one TNA (threose nucleic acid) at position 1, counting from the 5′ end; and
wherein the CNS disorder is selected from the group consisting of alzheimer, amyotrophic lateral schlerosis (ALS), frontotemporal dementia, huntington, Parkinson, spinocerebellar, prion, and lafora.

76-78. (canceled)
